(19) United States
(12) Patent Application Publication
(10) Pub. No.: US 2025/0163123 A1
(43) Pub. Date: May 22, 2025

(54) THERAPEUTIC REGIMENS FOR CHIMERIC ANTIGEN RECEPTOR (CAR)-EXPRESSING CELLS

(71) Applicants: Novartis AG, Basel (CH); The Trustees of the University of Pennsylvania, Philadelphia, PA (US)

(72) Inventors: David L. Porter, Springfield, PA (US); Noelle Frey, Narbeth, PA (US); Carl H. June, Merion Station, PA (US); Simon Lacey, Media, PA (US); Fang Chen, Ardmore, PA (US); Jan J. Melenhorst, Moreland Hills, OH (US); Tetiana Taran, East Hanover, NJ (US); Karen Thudium Mueller, Morristown, NJ (US); Patricia Wood, West Orange, NJ (US); Yiyun Zhang, Basking Ridge, NJ (US)

(21) Appl. No.: 18/884,583

(22) Filed: Sep. 13, 2024

Related U.S. Application Data
(63) Continuation of application No. 16/305,728, filed on Nov. 29, 2018, now abandoned.
(60) Provisional application No. 62/492,784, filed on May 1, 2017.
(60) Provisional application No. 62/490,911, filed on Apr. 27, 2017.
(60) Provisional application No. 62/455,547, filed on Feb. 6, 2017.
(60) Provisional application No. 62/434,974, filed on Dec. 15, 2016.
(60) Provisional application No. 62/429,294, filed on Dec. 2, 2016.
(60) Provisional application No. 62/381,163, filed on Aug. 30, 2016.
(60) Provisional application No. 62/344,958, filed on Jun. 2, 2016.

(51) Int. Cl. C07K 14/705; A61K 40/11; A61K 40/31; A61K 40/42; A61P 35/00; C07K 16/28; C12N 5/0783; G01N 33/50; G01N 33/68

(52) U.S. Cl. CPC C07K 14/705; A61K 40/11; A61K 40/31; A61K 40/4211; A61K 40/4215; A61P 35/00; C07K 16/2803; C12N 5/0636; G01N 33/5008; G01N 33/68; A61K 2239/31; A61K 2239/38; A61K 2239/48; G01N 2800/52

(57) ABSTRACT

The invention provides a method of treating an adult subject having a hematological cancer, comprising administering to the subject selected dosage regimens comprising a plurality of immune effector cells expressing a CAR molecule.

[0001] This application is a continuation of U.S. application Ser. No. 16/305,728, filed Nov. 29, 2018, which is a U.S. National Stage Application under 35 U.S.C. § 371 of International Application No. PCT/US2017/035778, filed Jun. 2, 2017, which claims priority to U.S. Ser. No. 62/344,958 filed Jun. 2, 2016, U.S. Ser. No. 62/381,163 filed Aug. 30, 2016, U.S. Ser. No. 62/429,294 filed Dec. 2, 2016, U.S. Ser. No. 62/434,974 filed Dec. 15, 2016, U.S. Ser. No. 62/455,547 filed Feb. 6, 2017, U.S. Ser. No. 62/490,911 filed Apr. 27, 2017, and U.S. Ser. No. 62/492,784 filed May 1, 2017, the contents of all of which are incorporated herein by reference in their entireties.

### SEQUENCE LISTING

[0002] The instant application contains a Sequence Listing which has been submitted electronically in XML format and is hereby incorporated by reference in its entirety. Said XML copy, created on Aug. 1, 2024, is named N2067-7220_SL and is 1,965,587 bytes in size.

### FIELD OF THE INVENTION

[0003] The present invention relates, at least in part, to dosage regimens for immune cells engineered to express a Chimeric Antigen Receptor (CAR).

### BACKGROUND OF THE INVENTION

[0004] Many patients with B cell malignancies are incurable with standard therapy. In addition, traditional treatment options often have serious side effects. Attempts have been made in cancer immunotherapy, however, several obstacles render this a very difficult goal to achieve clinical effectiveness. Although hundreds of so-called tumor antigens have been identified, these are generally derived from self and thus are poorly immunogenic. Furthermore, tumors use several mechanisms to render themselves hostile to the initiation and propagation of immune attack.

[0005] Recent developments using chimeric antigen receptor (CAR) modified autologous T cell (CART) therapy, which relies on redirecting T cells to a suitable cell-surface molecule on cancer cells such as B cell malignancies, show promising results in harnessing the power of the immune system to treat B cell malignancies and other cancers (see, e.g., Sadelain et al., Cancer Discovery 3:388-398 (2013)). The clinical results of the murine derived CART19 (i.e., “CTL019”) have shown promise in establishing complete remissions in patients suffering with CLL as well as in childhood ALL (see, e.g., Kalos et al., Sci Transl Med 3:95ra73 (2011), Porter et al., NEJM 365:725-733 (2011), Grupp et al., NEJM 368:1509-1518 (2013)). Besides the ability for the chimeric antigen receptor on the genetically modified T cells to recognize and destroy the targeted cells, a successful therapeutic T cell therapy needs to have the ability to proliferate and persist over time, in order to survey for leukemic relapse. The variable quality of T cells, resulting from anergy, suppression, or exhaustion, will have effects on CAR-transformed T cells' performance, over which skilled practitioners have limited control at this time. To be effective, CAR transformed patient T cells need to persist and maintain the ability to proliferate in response to the cognate antigen. It has been shown that ALL patient T cells perform can do this with CART19 comprising a murine scFv (see, e.g., Grupp et al., NEJM 368:1509-1518 (2013)).

### SUMMARY OF THE INVENTION

[0006] The disclosure features, at least in part, CAR dosage regimens that maintain efficacy while reducing side effects. In one embodiment, the invention pertains to a method of treating a subject having a cancer (e.g., a hematological cancer), comprising administering to the subject a plurality of cells comprising a CAR molecule. In another embodiment, the plurality of CAR-expressing cells is administered as a single dose, e.g., a single dose as described herein. In other embodiments, the plurality of CAR-expressing cells are administered as multiple doses, e.g., a first dose, a second dose, and optionally a third dose, e.g., as described herein. Additionally disclosed are assays and methods for evaluating responsiveness to a CAR therapy or monitoring a subject undergoing a CAR therapy, e.g., a B cell-targeting CAR therapy, by detecting the level of soluble BCMA; or methods of evaluating the suitability for manufacturing of a CAR therapy. Accordingly, methods and compositions comprising a plurality of CAR-expressing cells, as well as methods of monitoring, or making, a CAR therapy are disclosed.

[0007] Accordingly, in one aspect, disclosed herein is a plurality of cells that express a chimeric antigen receptor (CAR) molecule for use in the treatment of a subject having hematological cancer. In embodiments, the CAR molecule binds to a B-cell antigen, e.g., a CD19, BCMA, CD20, CD10, CD22, CD34, CD123, FLT-3, ROR1, CD79b, CD179b, or CD79a. In one embodiment, the CAR molecule is:
[0008] (i) a murine CAR molecule that binds to CD19, and wherein the hematological cancer is acute lymphoblastic leukemia (ALL);
[0009] (ii) a humanized CAR molecule that binds to CD19; or
[0010] (iii) a CAR molecule that binds to BCMA.

[0011] In one embodiment, the plurality of CAR-expressing cells are administered at a dose of about 0.2×10⁶ to 5.0×10⁶ (e.g., 0.2×10⁶ to 5.0×10⁶) viable CAR-expressing cells/kg, e.g., when the subject weighs ≤50 kg; or at a dose of about 0.1×10⁸ to 2.5×10⁸ (e.g., 0.1×10⁸ to 2.5×10⁸) viable CAR-expressing cells, e.g., when the subject weighs >50 kg. In one aspect, disclosed herein is a method of treating a subject having a hematological cancer, comprising administering to the subject in need thereof a plurality of cells that express a chimeric antigen receptor (CAR) molecule. In embodiments, the CAR molecule binds to a B-cell antigen, e.g., a CD19, BCMA, CD20, CD10, CD22, CD34, CD123, FLT-3, ROR1, CD79b, CD179b, or CD79a. In one embodiment, the CAR molecule is:
[0012] (i) a murine CAR molecule that binds to CD19, and wherein the hematological cancer is acute lymphoblastic leukemia (ALL);
[0013] (ii) a humanized CAR molecule that binds to CD19; or
[0014] (iii) a CAR molecule that binds to BCMA.

[0015] In one embodiment, the plurality of cells is administered at:
[0016] at a dose of about 0.2×10⁶ to 5.0×10⁶ (e.g., 0.2×10⁶ to 5.0×10⁶) viable CAR-expressing cells/kg, e.g., when the subject weighs ≤50 kg; or at a dose of about 0.1×10⁸ to 2.5×10⁸ (e.g., 0.1×10⁸ to 2.5×10⁸) viable CAR-expressing cells, e.g., when the subject weighs >50 kg.

[0017] In one embodiment, the plurality of cells is administered at:
[0018] (i) a dose of about 0.2×10⁶ to 2.0×10⁶ (e.g., 0.2×10⁶ to 2.0×10⁶), about 0.2×10⁶ to 1.8×10⁶ (e.g., 0.2×10⁶ to 1.8×10⁶), about 0.2×10⁶ to 1.6×10⁶ (e.g., 0.2×10⁶ to 1.6×10⁶), about 0.2×10⁶ to 1.4×10⁶ (e.g., 0.2×10⁶ to 1.4×10⁶), about 0.2×10⁶ to 1.2×10⁶ (e.g., 0.2×10⁶ to 1.2×10⁶), about 0.2×10⁶ to 1.0×10⁶ (e.g., 0.2×10⁶ to 1.0×10⁶), about 0.2×10⁶ to 0.8×10⁶ (e.g., 0.2×10⁶ to 0.8×10⁶), about 0.2×10⁶ to 0.6×10⁶ (e.g., 0.2×10⁶ to 0.6×10⁶), or about 0.2×10⁶ to 0.4×10⁶ (e.g., 0.2×10⁶ to 0.4×10⁶) viable CAR-expressing cells/kg, e.g., when the subject weighs ≤50 kg;
[0019] (ii) a dose of about 0.2×10⁶ (e.g., 0.2×10⁶), about 0.4×10⁶ (e.g., 0.4×10⁶), about 0.6×10⁶ (e.g., 0.6×10⁶), about 0.8×10⁶ (e.g., 0.8×10⁶), about 1.0×10⁶ (e.g., about 1.0×10⁶), about 1.5×10⁶ (e.g., 1.5×10⁶), about 2.0×10⁶ (e.g., 2.0×10⁶), about 2.5×10⁶ (e.g., 2.5×10⁶), about 3.0×10⁶ (e.g., 3.0×10⁶), about 3.5×10⁶ (e.g., 3.5×10⁶), about 4.0×10⁶ (e.g., 4.0×10⁶), about 4.5×10⁶ (e.g., 4.5×10⁶), or about 5.0×10⁶ (e.g., 5.0×10⁶) viable CAR-expressing cells/kg, e.g., when the subject weighs ≤50 kg;
[0020] (iii) a dose of about 0.1×10⁸ to 1.0×10⁸ (e.g., 0.1×10⁸ to 1.0×10⁸), about 0.1×10⁸ to 0.9×10⁸ (e.g., 0.1×10⁸ to 0.9×10⁸), about 0.1×10⁸ to 0.8×10⁸ (e.g., 0.1×10⁸ to 0.8×10⁸), about 0.1×10⁸ to 0.6×10⁸ (e.g., 0.1×10⁸ to 0.6×10⁸), about 0.1×10⁸ to 0.4×10⁸ (e.g., 0.1×10⁸ to 0.4×10⁸), about 0.1×10⁸ to 0.2×10⁸ (e.g., 0.1×10⁸ to 0.2×10⁸), about 0.2×10⁸ to 1.0×10⁸ (e.g., 0.2×10⁸ to 1.0×10⁸), about 0.2×10⁸ to 0.9×10⁸ (e.g., 0.2×10⁸ to 0.9×10⁸), about 0.2×10⁸ to 0.8×10⁸ (e.g., 0.2×10⁸ to 0.8×10⁸), about 0.2×10⁸ to 0.6×10⁸ (e.g., 0.2×10⁸ to 0.6×10⁸), or about 0.2×10⁸ to 0.4×10⁸ (e.g., 0.2×10⁸ to 0.4×10⁸) viable CAR-expressing cells, e.g., when the subject weighs >50 kg; or
[0021] (iv) a dose of about 0.1×10⁸ (e.g., 0.1×10⁸), about 0.2×10⁸ (e.g., 0.2×10⁸), about 0.4×10⁸ (e.g., 0.4×10⁸), about 0.6×10⁸ (e.g., 0.6×10⁸), about 0.8×10⁸ (e.g., 0.8×10⁸), about 1.0×10⁸ (e.g., 1.0×10⁸), about 1.5×10⁸ (e.g., 1.5×10⁸), about 2.0×10⁸ (e.g., 2.0×10⁸), or about 2.5×10⁸ (e.g., 2.5×10⁸) viable CAR-expressing cells, e.g., when the subject weighs >50 kg.

[0022] In one embodiment, the subject is a pediatric or young adult. In one embodiment, the subject is aged about 3 to 23 years, e.g., aged 3 to 23 years. In one embodiment, the subject is aged about 1 to 24 years, e.g., aged 1 to 24 years. In one embodiment, the subject is aged about 3 to 25 years, e.g., aged 3 to 25 years.

[0023] In one embodiment, the subject is an adult.

[0024] In one embodiment, the hematological cancer is chosen from acute leukemia, B-cell acute lymphoblastic leukemia (BALL), T-cell acute lymphoblastic leukemia (TALL), small lymphocytic leukemia (SLL), acute lymphoblastic leukemia (ALL), chronic leukemia, chronic myelogenous leukemia (CML), chronic lymphocytic leukemia (CLL), non-Hodgkin lymphoma, or multiple myeloma. In one embodiment, the hematological cancer is acute lymphoblastic leukemia (ALL), e.g., relapsed or refractory B-cell ALL. In one embodiment, the hematological cancer is relapsed or refractory CD19+ ALL. In one embodiment, the hematological cancer has CNS involvement.

[0025] In one aspect, disclosed herein is a container (e.g., an infusion bag) comprising a plurality of cells that express a chimeric antigen receptor (CAR) molecule. In embodiments, the CAR molecule binds to a B-cell antigen, e.g., a CD19, BCMA, CD20, CD10, CD22, CD34, CD123, FLT-3, ROR1, CD79b, CD179b, or CD79a. In one embodiment, the CAR molecule is:
[0026] (i) a murine CAR molecule that binds to CD19, and wherein the hematological cancer is acute lymphoblastic leukemia (ALL);
[0027] (ii) a humanized CAR molecule that binds to CD19; or
[0028] (iii) a CAR molecule that binds to BCMA.

[0029] In embodiments, the container is suitable for administration to a subject having hematological cancer at a dose of about 0.2×10⁶ to 5.0×10⁶ viable CAR-expressing cells/kg, e.g., when the subject weighs ≤50 kg; or a dose of about 0.1×10⁸ to 2.5×10⁸ viable CAR-expressing cells, e.g., when the subject weighs >50 kg.

[0030] In one embodiment, the container (e.g., an infusion bag) is suitable for administration at:
[0031] (i) a dose of about 0.2×10⁶ to 2.0×10⁶ (e.g., 0.2×10⁶ to 2.0×10⁶), about 0.2×10⁶ to 1.8×10⁶ (e.g., 0.2×10⁶ to 1.8×10⁶), about 0.2×10⁶ to 1.6×10⁶ (e.g., 0.2×10⁶ to 1.6×10⁶), about 0.2×10⁶ to 1.4×10⁶ (e.g., 0.2×10⁶ to 1.4×10⁶), about 0.2×10⁶ to 1.2×10⁶ (e.g., 0.2×10⁶ to 1.2×10⁶), about 0.2×10⁶ to 1.0×10⁶ (e.g., 0.2×10⁶ to 1.0×10⁶), about 0.2×10⁶ to 0.8×10⁶ (e.g., 0.2×10⁶ to 0.8×10⁶), about 0.2×10⁶ to 0.6×10⁶ (e.g., 0.2×10⁶ to 0.6×10⁶), or about 0.2×10⁶ to 0.4×10⁶ (e.g., 0.2×10⁶ to 0.4×10⁶) viable CAR-expressing cells/kg, e.g., when the subject weighs ≤50 kg;
[0032] (ii) a dose of about 0.2×10⁶ (e.g., 0.2×10⁶), about 0.4×10⁶ (e.g., 0.4×10⁶), about 0.6×10⁶ (e.g., 0.6×10⁶), about 0.8×10⁶ (e.g., 0.8×10⁶), about 1.0×10⁶ (e.g., about 1.0×10⁶), about 1.5×10⁶ (e.g., 1.5×10⁶), about 2.0×10⁶ (e.g., 2.0×10⁶), about 2.5×10⁶ (e.g., 2.5×10⁶), about 3.0×10⁶ (e.g., 3.0×10⁶), about 3.5×10⁶ (e.g., 3.5×10⁶), about 4.0×10⁶ (e.g., 4.0×10⁶), about 4.5×10⁶ (e.g., 4.5×10⁶), or about 5.0×10⁶ (e.g., 5.0×10⁶) viable CAR-expressing cells/kg, e.g., when the subject weighs ≤50 kg;
[0033] (iii) a dose of about 0.1×10⁸ to 1.0×10⁸ (e.g., 0.1×10⁸ to 1.0×10⁸), about 0.1×10⁸ to 0.9×10⁸ (e.g., 0.1×10⁸ to 0.9×10⁸), about 0.1×10⁸ to 0.8×10⁸ (e.g., 0.1×10⁸ to 0.8×10⁸), about 0.1×10⁸ to 0.6×10⁸ (e.g., 0.1×10⁸ to 0.6×10⁸), about 0.1×10⁸ to 0.4×10⁸ (e.g., 0.1×10⁸ to 0.4×10⁸), about 0.1×10⁸ to 0.2×10⁸ (e.g., 0.1×10⁸ to 0.2×10⁸), about 0.2×10⁸ to 1.0×10⁸ (e.g., 0.2×10⁸ to 1.0×10⁸), about 0.2×10⁸ to 0.9×10⁸ (e.g., 0.2×10⁸ to 0.9×10⁸), about 0.2×10⁸ to 0.8×10⁸ (e.g., 0.2×10⁸ to 0.8×10⁸), about 0.2×10⁸ to 0.6×10⁸ (e.g., 0.2×10⁸ to 0.6×10⁸), or about 0.2×10⁸ to 0.4×10⁸ (e.g., 0.2×10⁸ to 0.4×10⁸) viable CAR-expressing cells, e.g., when the subject weighs >50 kg; or
[0034] (iv) a dose of about 0.1×10⁸ (e.g., 0.1×10⁸), about 0.2×10⁸ (e.g., 0.2×10⁸), about 0.4×10⁸ (e.g., 0.4×10⁸), about 0.6×10⁸ (e.g., 0.6×10⁸), about 0.8×10⁸ (e.g., 0.8×10⁸), about 1.0×10⁸ (e.g., 1.0×10⁸), about 1.5×10⁸ (e.g., 1.5×10⁸), about 2.0×10⁸ (e.g., 2.0×10⁸), or about 2.5×10⁸ (e.g., 2.5×10⁸) viable CAR-expressing cells, e.g., when the subject weighs >50 kg.

[0035] In one aspect, disclosed herein is a kit comprising:
[0036] (i) a container (e.g., an infusion bag) comprising a plurality of cells that express a chimeric antigen receptor (CAR) molecule; and
[0037] (ii) instructions for administration.

[0038] In embodiments, the CAR molecule binds to a B-cell antigen, e.g., a CD19, BCMA, CD20, CD10, CD22, CD34, CD123, FLT-3, ROR1, CD79b, CD179b, or CD79a. In one embodiment, the CAR molecule is:
[0039] (a) a murine CAR molecule that binds to CD19, and wherein the hematological cancer is acute lymphoblastic leukemia (ALL);
[0040] (b) a humanized CAR molecule that binds to CD19; or
[0041] (c) a CAR molecule that binds to BCMA, In embodiments, the container is suitable for administration to a subject having hematological cancer at a dose of about 0.2×10⁶ to 5.0×10⁶ (e.g., 0.2×10⁶ to 5.0×10⁶) viable CAR-expressing cells/kg, e.g., when the subject weighs ≤50 kg; or a dose of about 0.1×10⁸ to 2.5×10⁸ (e.g., 0.1×10⁸ to 2.5×10⁸) viable CAR-expressing cells, e.g., when the subject weighs >50 kg.

[0042] In one aspect, disclosed herein are a plurality of cells that express a chimeric antigen receptor (CAR) molecule for use in the treatment of a subject having hematological cancer. In embodiments, the CAR molecule binds to a B-cell antigen, e.g., a CD19, BCMA, CD20, CD10, CD22, CD34, CD123, FLT-3, ROR1, CD79b, CD179b, or CD79a. In one embodiment, the CAR molecule is:
[0043] (i) a murine CAR molecule that binds to CD19, and wherein the hematological cancer is acute lymphoblastic leukemia (ALL);
[0044] (ii) a humanized CAR molecule that binds to CD19; or
[0045] (iii) a CAR molecule that binds to BCMA.

[0046] In embodiments, the plurality of cells are administered in at least two (e.g., three) doses, which together add up to a total dose of, e.g., at least about 0.2×10⁶ (e.g., 0.2×10⁶) viable CAR-expressing cells/kg, e.g., when the subject weighs ≤50 kg; or a total dose of at least about 0.1×10⁸ (e.g., 0.1×10⁸) viable CAR-expressing cells, e.g., when the subject weighs >50 kg.

[0047] In one aspect, disclosed herein is a method of treating a subject having hematological cancer, comprising administering to the subject at least two (e.g., three) doses of a plurality of cells that express a chimeric antigen receptor (CAR) molecule. In embodiments, the CAR molecule binds to a B-cell antigen, e.g., a CD19, BCMA, CD20, CD10, CD22, CD34, CD123, FLT-3, ROR1, CD79b, CD179b, or CD79a. In one embodiment, the CAR molecule is:
[0048] (i) a murine CAR molecule that binds to CD19, and wherein the hematological cancer is acute lymphoblastic leukemia (ALL);
[0049] (ii) a humanized CAR molecule that binds to CD19; or
[0050] (iii) a CAR molecule that binds to BCMA, In embodiments, the at least two (e.g., three) doses together add up to a total dose of at least about 0.2×10⁶ (e.g., 0.2×10⁶) viable CAR-expressing cells/kg, e.g., when the subject weighs ≤50 kg; or a total dose of at least about 0.1×10⁸ (e.g., 0.1×10⁸) viable CAR-expressing cells, e.g., when the subject weighs >50 kg.

[0051] In one embodiment, the at least two (e.g., three) doses are administered separately with a time interval of about one day.

[0052] In one embodiment, the at least two (e.g., three) doses comprise a first dose, a second dose, and a third dose, wherein the first dose is administered on a first day of treatment, the second dose is administered on a subsequent (e.g., second, third, fourth, fifth, sixth, or seventh or later) day of treatment, and the third dose is administered on a yet subsequent (e.g., third, fourth, fifth, sixth, seventh, eighth, ninth, tenth, or later) day of treatment.

[0053] In one embodiment, the at least two (e.g., three) doses comprise a first dose, a second dose, and a third dose, wherein the first dose is administered on the first day of treatment, the second dose is administered on the second day of treatment, and the third dose is administered on the third day of treatment.

[0054] In one embodiment, the at least two (e.g., three) doses comprise a first dose, a second dose, and a third dose, wherein the first dose is about 10% (e.g., 10%) of the total dose, the second dose is about 30% (e.g., 30%) of the total dose, and the third dose is about 60% (e.g., 60%) of the total dose.

[0055] In one embodiment, the total dose is about 5×10⁷ to 5×10⁸ viable CAR-expressing cells (e.g., about 5×10⁷, e.g., 5×10⁷, or about 5×10⁸, e.g., 5×10⁸, viable CAR-expressing cells).

[0056] In embodiments, the CAR-expressing cells (e.g., CD19 CAR-expressing cells or BCMA CAR-expressing cells) are administered to the subject according to a dosing regimen comprising a total dose of cells administered to the subject by dose fractionation, e.g., one, two, three or more separate administration of a partial dose. In embodiments, a first percentage of the total dose is administered on a first day of treatment, a second percentage of the total dose is administered on a subsequent (e.g., second, third, fourth, fifth, sixth, or seventh or later) day of treatment, and optionally, a third percentage (e.g., the remaining percentage) of the total dose is administered on a yet subsequent (e.g., third, fourth, fifth, sixth, seventh, eighth, ninth, tenth, or later) day of treatment. For example, 10% of the total dose of cells is delivered on the first day, 30% of the total dose of cells is delivered on the second day, and the remaining 60% of the total dose of cells is delivered on the third day of treatment. For example, a total cell dose includes 1 to 5×10⁷ or 1 to 5×10⁸ CAR-expressing cells (e.g., CD19 CAR-expressing cells or BCMA CAR-expressing cells).

[0057] In one embodiment of the preceding methods, the plurality of cells comprise T cells or NK cells.

[0058] In embodiments, the subject is a mammal, e.g., a human.

[0059] In one embodiment, the subject is a pediatric or young adult. In one embodiment, the subject is aged about 3 to 23 years, e.g., aged 3 to 23 years. In one embodiment, the subject is aged about 1 to 24 years, e.g., aged 1 to 24 years. In one embodiment, the subject is aged about 3 to 25 years, e.g., aged 3 to 25 years.

[0060] In one embodiment, the subject is an adult.

[0061] In one embodiment, the hematological cancer is chosen from acute leukemia, B-cell acute lymphoblastic leukemia (BALL), T-cell acute lymphoblastic leukemia (TALL), small lymphocytic leukemia (SLL), acute lymphoblastic leukemia (ALL), chronic leukemia, chronic myelogenous leukemia (CML), chronic lymphocytic leukemia (CLL), non-Hodgkin lymphoma, or multiple myeloma. In one embodiment, the hematological cancer is acute lymphoblastic leukemia (ALL), e.g., relapsed or refractory B-cell ALL. In one embodiment, the hematological cancer is relapsed or refractory CD19+ ALL. In one embodiment, the hematological cancer has CNS involvement.

### CRS Treatment

[0062] The disclosure also features, at least in part, CAR dosage regimens that maintain efficacy while reducing the risk of CRS (cytokine release syndrome). In one embodiment shown in Example 26, dividing a dose of CAR expressing cells for administration in three increments can produce as good efficacy as a single dose, but without a concomitant increase in severe CRS.

[0063] In embodiments, the subject is evaluated for CRS after receiving a dose, e.g., after receiving the first dose, the second dose, and/or the third dose.

[0064] In embodiments, the subject receives a CRS treatment, e.g., tocilizumab, bazedoxifene, a corticosteroid, etanercept, or siltuximab. In embodiments, the CRS treatment is administered before or after the first dose of cells comprising the CAR molecule. In embodiments, the CRS treatment is administered before or after the second dose of cells comprising the CAR molecule. In embodiments, the CRS treatment is administered before or after the third dose of cells comprising the CAR molecule. In embodiments, the CRS treatment is administered between the first and second doses of cells comprising the CAR molecule, and/or between the second and third doses of cells comprising the CAR molecule.

[0065] In embodiments, in a subject having CRS after the first dose, e.g., CRS grade 1, 2, 3, or 4, the second dose is administered at least 2, 3, 4, or 5 days after the first dose. In embodiments, in a subject having CRS after the second dose, e.g., CRS grade 1, 2, 3, or 4, the third dose is administered at least 2, 3, 4, or 5 days after the second dose. In embodiments, in a subject having CRS after the first dose, the second dose of CAR-expressing cells is delayed relative to when the second dose would have been administered had the subject not had CRS. In embodiments, in a subject having CRS after the second dose, the third dose of CAR-expressing cells is delayed relative to when the third dose would have been administered had the subject not had CRS.

[0066] In embodiments, the subject has a cancer with a high disease burden before the first dose is administered. In embodiments, the subject has bone marrow blast levels of at least 1%, 2%, 3%, 4%, 5%, 6%, 7%, 8%, 9%, 10%, 15%, 20%, 25%, 30%, 35%, 40%, 45%, or 50%, e.g., at least 5%. In embodiments, the subject has a cancer in stage I, II, III, or IV. In embodiments, the subject has a tumor mass of at least 1, 2, 5, 10, 20, 50, 100, 200, 500, or 1000 g, e.g., in a single tumor or a plurality of tumors.

[0067] In some embodiments, the subject has cancer (e.g., a solid cancer or a hematological cancer as described herein). In an embodiment, the subject has CLL. In embodiments, the subject has ALL. In other embodiments, the subject has multiple myeloma.

[0068] In one embodiment, the cancer is a disease associated with CD19 expression, e.g., as described herein.

[0069] In other embodiments, the cancer is a disease associated with a tumor antigen, e.g., a B-cell antigen as described herein. In embodiments, the CAR molecule is a CAR molecule as described herein (e.g., a CAR molecule that binds to a B-cell antigen, e.g., CD19 CAR or a BCMA CAR described herein).

### Additional Therapeutic Methods

[0070] In another aspect, the present disclosure provides a method of treating a subject having a hematological cancer with CNS (central nervous system) involvement. The present disclosure also provides, in some aspects, a method of reducing CNS involvement or preventing a relapse of CNS involvement in a subject having a hematologic cancer. The method comprises administering to the subject in need thereof an effective number of immune effector cells expressing a CAR molecule, e.g., a CAR molecule that binds to a B-cell antigen, e.g., CD19 or BCMA. In some embodiments, the hematological cancer is a leukemia, e.g., acute lymphoblastic leukemia (ALL), e.g, relapsed or refractory ALL. In embodiments, the hematological cancer is a metastatic hematological cancer, e.g., a metastatic leukemia or lymphoma. In other embodiments, the hematological cancer is chosen from CNS lymphoma, CNS leukemia, or CNS AML. In some embodiments, the subject is a pediatric or young adult subject.

[0071] In one embodiment, CNS involvement is determined by measuring the presence of hematological cancer cells (e.g., blast cells) in cerebral spinal fluid (CSF).

[0072] In some embodiments, the subject has, or is identified as having, a hematological cancer with CNS involvement, e.g., a relapsed or refractory hematological cancer with CNS involvement. In some embodiments, the subject has, or is identified as having, relapsed or refractory ALL with CNS involvement. In some embodiments, the subject has, or is identified as having, active CNS3 status. In some embodiments, the subject is a pediatric or young adult subject.

[0073] In embodiments, the subject has, or is identified as having, one or more of: a CNS relapse, combined BM/CNS relapse, ocular involvement, or parenchymal changes of brain or spine. In one embodiment, the subject has or is identified as having a CNS relapse, e.g., having a score of CNS3 by lumbar puncture (LP) (e.g., >5 WBC/mL with blasts), or by detecting brain/ocular involvement, e.g., by imaging. In embodiments, the subject has, or is identified as having, <0.01% blasts, 0.01-5% blasts, >5% blasts, 5-50% blasts, or >50% blasts. In embodiments, the leukemia is Philadelphia chromosome positive. In embodiments, the subject is at a first or subsequent relapse (e.g., 2nd, 3rd, 4th, 5th, 6th, or 7th relapse). In embodiments, the subject was previously treated with radiation or bone marrow transplant. In embodiments, the subject was previously treated with chemotherapy or radiation.

[0074] In embodiments, the subject undergoes lymphodepletion (e.g., with fludarabine and/or cyclophosphamide) before administration of the immune effector cells.

[0075] In embodiments, after administration, the subject experiences complete response (CR), e.g., at day 28 after the administration. In embodiments, the subject has <0.01% minimal residual disease (MRD) (e.g., by flow cytometry), e.g., at day 28 after the administration or 3 months after the administration, e.g., without further anticancer therapy. In embodiments, the subject has CR with MRD (e.g., >0.01%), e.g., at day 28 after the administration or 3 months after the administration, e.g., without further anticancer therapy. In embodiments, after the administration, the subject has no CNS involvement. In embodiments, after the administration, the subject experiences a reduction in CNS status, e.g., from CNS3 to CNS2 or CNS1, or from CNS2 to CNS1. In embodiments, a subject having CNS1 has no detectable blast cells in CSF, a subject having CNS2 has <5 WBC/μl CSF with blast cells; and a subject having CNS3 has >5 WBC/μl CSF with blast cells. In embodiments, the subject is in CR at least at 8, 23, or 31 months after the administration, or at least at 2, 4, 6, 8, 12, 18, 24, 30, or 36 months after the administration. In embodiments, the subject experiences CR for a duration of at least 8, 23, or 31 months after the administration, or at least 2, 4, 6, 8, 12, 18, 24, 30, or 36 months after the administration.

[0076] In embodiments, the method further comprises testing a subject for CNS involvement, e.g., by lumbar puncture and/or by imaging to detect brain or ocular involvement, before or after the administration. In embodiments, the method further comprises testing a subject for bone marrow disease or MRD, before or after the administration. In embodiments, the testing is performed at one or more of 1, 3, 6, 9, or 12 months after the administration.

[0077] In embodiments, after the administration, the subject does not experience one or more of: CRS, severe CRS, encephalopathy (e.g., encephalopathy grade 2-3), seizures (e.g., seizures grade 2-4), vision disturbance, speech disturbance, trigeminal neuralgia, confusion, dizziness, ataxia, or agitation.

[0078] In some embodiments, the immune effector cell is an immune effector cell described herein. In some embodiments, the CAR molecule is a CAR molecule described herein. In some embodiments, the CAR molecule comprises the amino acid sequence of residues 22-486 of SEQ ID NO: 58, residues 22-486 of any one of SEQ ID NOs: 31-34 or 42, or residues 22-491 of any one of SEQ ID NOs: 35-41. In some embodiments the CAR molecule comprises an antigen binding domain comprising one or more sequence selected from SEQ ID NOS:1-12. In embodiments, the immune effector cells are administered as a monotherapy.

[0079] In embodiments, a CAR therapy described herein can be used in lieu of a standard of care for CNS involvement, e.g., radiation therapy.

[0080] In yet another aspect, the present disclosure provides a method of treating one or more of a neurological toxicity, CRS, or posterior reversible encephalopathy syndrome (PRES). The method comprises administering to a subject in need thereof a therapeutically effective amount of cyclophosphamide. In related aspects, the present disclosure provides cyclophosphamide for use in treating neurological toxicity, CRS, or posterior reversible encephalopathy syndrome (PRES). In embodiments, the administration of cyclophosphamide is subsequent to a cell-based therapy, e.g., a cell-based therapy for cancer (e.g., a CD19-inhibiting therapy, or a CD19-depleting therapy), or the subject has been previously treated with a cell-based therapy, e.g., a cell-based therapy for cancer, a CD19-inhibiting therapy, or a CD19-depleting therapy. In embodiments, the administration of cyclophosphamide is prior to, at the same time as, or after the cell-based therapy.

[0081] In embodiments, the patient has, or is identified as having, CRS, PRES, or both. In some embodiments, the subject has been treated with a CD19 inhibiting or depleting therapy. In some embodiments, the CD19 inhibitor is a CD19 antibody, e.g., a CD19 bispecific antibody (e.g., a bispecific T cell engager that targets CD19, e.g., blinatumomab). In some embodiments, the therapy comprises a CAR-expressing cell, e.g., an anti-CD19 CAR. In embodiments, the subect suffers from a neurological toxicity, e.g., focal deficits (e.g., cranial nerve palsy or hemiparesis) or global abnormalities (e.g., generalized seizures, confusion), or status epilepticus. In embodiments, the subject does not have any clinical symptoms of CRS. In embodiments, the subject has one or more clinical symptoms of CRS. In embodiments, the subject has, or is identified as having, elevated IL-6 relative to a reference, e.g., to the subject's level of IL-6 prior to therapy with a CAR-expressing cell. In embodiments, the subject has, or is identified as having, elevated serum levels of a cytokine associated with CRS (e.g., IL-6 and/or IL-8) relative to a reference. In embodiments, the subject has, or is identified as having, elevated levels of a cytokine associated with CRS (e.g., CSF IL-6 and/or IL-8) relative to a reference. In embodiments, the subject is treated or has been treated with a therapy for CRS such as tocilizumab or a corticosteroid (e.g., methylprednisolone, hydrocortisone, or both). In embodiments, the subject has, or is identified as having, an increase in circulating, activated CAR-expressing cells. In embodiments, the subject has, or is identified as having, CAR-expressing cells in the CSF.

[0082] In some aspects, the present disclosure also provides a method of treating a human subject (e.g., a pediatric or young adult subject) having acute lymphoblastic leukemia (ALL), comprising: administering to the subject immune effector cells expressing a CAR molecule that binds to CD19, wherein said CAR molecule comprises the amino acid sequence of residues 22-486 of SEQ ID NO: 58, residues 22-486 of any one of SEQ ID NOs: 31-34 or 42, or residues 22-491 of any one of SEQ ID NOs: 35-41, at a dose of 2.0-5.0×10⁶ cells/kg (e.g., when the subject weighs ≤50 kg) or a dose of 1.0-2.5×10⁸ cells (e.g., when the subject weighs >50 kg). In a related aspect, the present disclosure provides a method of selecting a dose of subject immune effector cells expressing a CAR molecule that binds to CD19, wherein said CAR molecule comprises the amino acid sequence of residues 22-486 of SEQ ID NO: 58, residues 22-486 of any one of SEQ ID NOs: 31-34 or 42, or residues 22-491 of any one of SEQ ID NOs: 35-41 for a subject having ALL, wherein (i) if the subject weighs ≤50 kg, selecting a dose of 2.0-5.0×10⁶ cells/kg, and (ii) if the subject weighs >50 kg, selecting a dose of 1.0-2.5×10⁸ cells.

[0083] In embodiments, the subject experiences remission (e.g., CR or CRi) after the administration of the immune effector cells. In embodiments, the subject is treated with lymphodepleting chemotherapy before the administration of the immune effector cells.

[0084] In embodiments, the dose of immune effector cells is about 2.0-3.0×10⁶, 2.0-4.0×10⁶, 2.0-5.0×10⁶, 3.0-4.0×10⁶, 3.0-5.0×10⁶, or 4.0-5.0×10⁶ cells/kg. In embodiments, the dose of immune effector cells is about 2.0×10⁶, 3.0×10⁶, or 4.0×10⁶ cells/kg. In embodiments, the dose of immune effector cells is about 1.0-1.5×10⁸, 1.0-2.0×10⁸, 1.0-2.5×10⁸, 1.5-2.0×10⁸, 1.5-2.5×10⁸, or 2.0-2.5×10⁸ cells. In embodiments, the dose of immune effector cells is about 1.0×10⁸, 1.5×10⁸, or 2.0-2.5×10⁸ cells. In embodiments, the subject receives a single dose of cells. In embodiments, the subject weighs ≤50 kg. In embodiments, the subject weighs >50 kg.

[0085] In other aspects, the disclosure provides a method of treating GC (germinal center)-DLBCL, NGC (non-germinal center)-DLBCL, transformed FL, or double hit DLBCL, comprising administering to a patient in need thereof a CD19 CAR-expressing cell, thereby treating the GC-DLBCL, NGC-DLBCL, transformed FL, or double hit DLBCL.

[0086] In some embodiments, the CD19 CAR (or a nucleic acid encoding it) comprises a sequence set out in any of Table 2, Table 3, Table 4, or Table 5. In embodiments, the CD19 CAR is CTL019. In other embodiments, the CD19 CAR is CTL119. In embodiments, the double hit DLBCL is DLBCL having chromosomal breakpoints affecting the MYC/8q24 locus and a second oncogene locus and arising either from transformation of follicular lymphoma or de novo. In embodiments, the DLBCL is a CD19+ DLBCL. In embodiments, the DLBCL is stage I, II, III, or IV. In embodiments, the DLBCL has bone marrow involvement. In embodiments, the DLBCL is GC-DLBCL or NGC-DLBCL. In embodiments, the second oncogene locus is BCL2 or BCL6. In embodiments, the patient received lymphodepleting chemotherapy prior to administration of the CD19 CAR-expressing cell. In embodiments, a single dose of CD19 CAR-expressing cells are administered. In embodiments, the patient experiences CRS. In embodiments, the patient experiences a response, e.g., complete response. In embodiments, the subject is administered a single dose of CD19 CAR-expressing cells. In embodiments, the CD19 CAR-expressing cells (e.g., CTL019 cells) are administered at a dose of about 5×10⁸ cells, e.g., about 4-6×10⁸ cells. In embodiments, the CD19 CAR-expressing cells (e.g., CTL019 cells) are administered at a dose of about 5-7×10⁶ cells/kg. In embodiments, the CD19 CAR-expressing cells (e.g., CTL019 cells) are administered at a dose of about 2×10⁸ cells, e.g., about 1-3×10⁸ cells. In embodiments, the CD19 CAR-expressing cells (e.g., CTL019 cells) are administered at a dose of about 3×10⁶ cells/kg, e.g., about 2-4×10⁶ cells/kg.

### Methods of Evaluating and Monitoring a Patient

[0087] The disclosure also features a method of evaluating, or monitoring, a subject receiving or who has received a chimeric antigen receptor (CAR) cell therapy for the effectiveness of the therapy using soluble BCMA (sBCMA) as a biomarker. In one embodiment, the CAR therapy is a CAR molecule that binds to a B-cell antigen, e.g., a CD19, BCMA, CD20, CD10, CD22, CD34, CD123, FLT-3, ROR1, CD79b, CD179b, or CD79a. In one embodiment, the CAR therapy is a CD19 CAR therapy or a BCMA CAR therapy.

[0088] In one aspect, disclosed herein is a method of evaluating the effectiveness of a CAR-expressing cell therapy in a subject having hematological cancer, who has received or is receiving the CAR-expressing cell therapy, comprising measuring soluble BCMA (sBCMA) level or activity (e.g., level) in the subject (e.g., in the serum of the subject) at at least two time points after the beginning of the CAR-expressing cell therapy, e.g., using a method described herein, e.g., ELISA, wherein:
[0089] (i) a decrease in the sBCMA level or activity over time indicates that the CAR-expressing cell therapy is effective in the subject (e.g., the subject responds to the CAR-expressing cell therapy); and
[0090] (ii) the absence of a decrease in the sBCMA level or activity over time indicates that the CAR-expressing cell therapy has reduced efficacy, e.g., is ineffective or is minimally effective, in the subject (e.g., the subject does not respond or only minimally responds to the CAR-expressing cell therapy),
[0091] thereby evaluating the subject.

[0092] In one embodiment,
[0093] (i) a decrease in the sBCMA level or activity at a subsequent (e.g., second, third, fourth, fifth, sixth, or seventh or later) time point relative to a prior (e.g., first, second, third, fourth, fifth, or sixth or later) time point, among the at least two time points, indicates that the CAR-expressing cell therapy is effective in the subject (e.g., the subject responds to the CAR-expressing cell therapy); and
[0094] (ii) the absence of a decrease in the sBCMA level or activity at a subsequent (e.g., second, third, fourth, fifth, sixth, or seventh or later) time point relative to a prior (e.g., first, second, third, fourth, fifth, or sixth or later) time point, among the at least two time points, indicates that the CAR-expressing cell therapy has reduced efficacy, e.g., is ineffective or is minimally effective, in the subject (e.g., the subject does not respond or only minimally responds to the CAR-expressing cell therapy).

[0095] In one embodiment, the CAR-expressing cell therapy comprises a plurality of cells that express a CAR molecule, wherein:
[0096] (i) a decrease in the sBCMA level or activity over time indicates that the plurality of cells that express a CAR molecule expand and/or persist in the subject; and
[0097] (ii) the absence of a decrease in the sBCMA level or activity over time indicates that the plurality of cells that express a CAR molecule do not expand and/or persist in the subject.

[0098] In one embodiment,
[0099] (i) a decrease in the sBCMA level or activity at a subsequent (e.g., second, third, fourth, fifth, sixth, or seventh or later) time point relative to a prior (e.g., first, second, third, fourth, fifth, or sixth or later) time point, among the at least two time points, indicates that the plurality of cells that express a CAR molecule expand and/or persist in the subject; and
[0100] (ii) the absence of a decrease in the sBCMA level or activity at a subsequent (e.g., second, third, fourth, fifth, sixth, or seventh or later) time point relative to a prior (e.g., first, second, third, fourth, fifth, or sixth or later) time point, among the at least two time points, indicates that the plurality of cells that express a CAR molecule do not expand and/or persist in the subject.

[0101] In one aspect, disclosed herein is a method of evaluating the effectiveness of a CAR-expressing cell therapy in a subject having hematological cancer, who has received or is receiving the CAR-expressing cell therapy, comprising:
[0102] (i) measuring soluble BCMA (sBCMA) level or activity (e.g., level) in the subject (e.g., in the serum of the subject) at at least one time point after the beginning of the CAR-expressing cell therapy, e.g., using a method described herein, e.g., ELISA, and
[0103] (ii) (optionally) comparing the sBCMA level or activity (e.g., level) (“sample value”) at the at least one time point with a reference sBCMA level or activity (e.g., level) (“reference value”), wherein:
[0104] (a) a decrease from the reference value to the sample value indicates that the CAR-expressing cell therapy is effective in the subject (e.g., the subject responds to the CAR-expressing cell therapy); and
[0105] (b) the absence of a decrease from the reference value to the sample value indicates that the CAR-expressing cell therapy has reduced efficacy, e.g., is ineffective or is minimally effective in the subject (e.g., the subject does not respond or only minimally responds to the CAR-expressing cell therapy),
[0106] thereby evaluating the subject.

[0107] In one embodiment, the reference value is a sBCMA level or activity (e.g., level) of a sample taken from the subject prior to the at least one time point (e.g., a sample taken from the subject prior to the beginning of the CAR-expressing cell therapy, or a sample taken from the subject after the beginning of the CAR-expressing cell therapy but prior to measuring the sBCMA level or activity at the at least one time point).

[0108] In one embodiment, the reference value is a sBCMA level or activity (e.g., level) of a sample taken from a different subject having hematological cancer (e.g., the same or a different hematological cancer).

[0109] In one embodiment, the reference value is an average sBCMA level or activity (e.g., level) of samples taken from a population of subjects having hematological cancer (e.g., the same or a different hematological cancer).

[0110] In one embodiment, the CAR-expressing cell therapy comprises a plurality of cells that express a CAR molecule, wherein:
[0111] (i) a decrease from the reference value to the sample value indicates that the plurality of cells that express a CAR molecule expand and/or persist in the subject; and
[0112] (ii) the absence of a decrease from the reference value to the sample value indicates that the plurality of cells that express a CAR molecule do not expand and/or persist in the subject. In one aspect, disclosed herein is a method of treating a subject having hematological cancer, who has received or is receiving a first CAR-expressing cell therapy, comprising measuring soluble BCMA (sBCMA) level or activity (e.g., level) in the subject (e.g., in the serum of the subject) at at least two time points after the beginning of the first CAR-expressing cell therapy, e.g., using a method described herein, e.g., ELISA, wherein if the sBCMA level or activity does not decrease over time, administer a second therapy to the subject, thereby treating the subject.

[0113] In one embodiment, if the sBCMA level or activity does not decrease at a subsequent (e.g., second, third, fourth, fifth, sixth, or seventh or later) time point relative to a prior (e.g., first, second, third, fourth, fifth, or sixth or later) time point, among the at least two time points, administer a second therapy to the subject.

[0114] In one aspect, disclosed herein is a method of treating a subject having hematological cancer, who has received or is receiving a first CAR-expressing cell therapy, comprising:
[0115] (i) measuring soluble BCMA (sBCMA) level or activity (e.g., level) in the subject (e.g., in the serum of the subject) at at least one time point after the beginning of the first CAR-expressing cell therapy, e.g., using a method described herein, e.g., ELISA, and
[0116] (ii) (optionally) comparing the sBCMA level or activity (e.g., level) (“sample value”) at the at least one time point with a reference sBCMA level or activity (e.g., level) (“reference value”),
[0117] wherein if the sample value does not decrease from the reference value, administer a second therapy to the subject, thereby treating the subject.

[0118] In one embodiment, the reference value is a sBCMA level or activity (e.g., level) of a sample taken from the subject prior to the at least one time point (e.g., a sample taken from the subject prior to the beginning of the CAR-expressing cell therapy, or a sample taken from the subject after the beginning of the CAR-expressing cell therapy but prior to measuring the sBCMA level or activity at the at least one time point).

[0119] In one embodiment, the reference value is a sBCMA level or activity (e.g., level) of a sample taken from a different subject having hematological cancer (e.g., the same or a different hematological cancer).

[0120] In one embodiment, the reference value is an average sBCMA level or activity (e.g., level) of samples taken from a population of subjects having hematological cancer (e.g., the same or a different hematological cancer).

[0121] In one embodiment, the CAR-expressing cell therapy comprises a plurality of cells that express a CAR molecule, wherein:
[0122] (i) a decrease from the reference value to the sample value indicates that the plurality of cells that express a CAR molecule expand and/or persist in the subject; and
[0123] (ii) the absence of a decrease from the reference value to the sample value indicates that the plurality of cells that express a CAR molecule do not expand and/or persist in the subject.

[0124] In one aspect, disclosed herein is a method of treating a subject having hematological cancer, comprising:
[0125] in response to a determination that the subject, after being administered a first CAR-expressing cell therapy, has not achieved, or has not been identified as having achieved, a decrease in soluble BCMA (sBCMA) level or activity (e.g., level), e.g., in the serum of the subject, e.g., as measured by a method described herein, e.g., ELISA, administering a second therapy to the subject, thereby treating the subject.

[0126] The disclosure also features a method of monitoring a subject having responded or partially responded to a chimeric antigen receptor (CAR) cell therapy for minimal residual disease using soluble BCMA (sBCMA) as a biomarker.

[0127] In one aspect, disclosed herein is a method of monitoring cancer relapse in a subject having hematological cancer, who has responded or partially responded to a CAR-expressing cell therapy, comprising measuring soluble BCMA (sBCMA) level or activity (e.g., level) in the subject (e.g., in the serum of the subject) at at least two time points after the subject responded or partially responded to the CAR-expressing cell therapy, e.g., using a method described herein, e.g., ELISA, wherein:
[0128] (i) an increase in the sBCMA level or activity over time indicates that the cancer is relapsing;
[0129] (ii) the absence of an increase, e.g., a decrease, in the sBCMA level or activity over time indicates that the cancer is not relapsing.

[0130] In one embodiment,
[0131] (i) an increase in the sBCMA level or activity at a subsequent (e.g., second, third, fourth, fifth, sixth, or seventh or later) time point relative to a prior (e.g., first, second, third, fourth, fifth, or sixth or later) time point, among the at least two time points, indicates that the cancer is relapsing; and
[0132] (ii) the absence of an increase in the sBCMA level or activity at a subsequent (e.g., second, third, fourth, fifth, sixth, or seventh or later) time point relative to a prior (e.g., first, second, third, fourth, fifth, or sixth or later) time point, among the at least two time points, indicates that the cancer is not relapsing.

[0133] In one aspect, disclosed herein is a method of monitoring cancer relapse in a subject having hematological cancer, who has responded or partially responded to a CAR-expressing cell therapy, comprising:
[0134] (i) measuring soluble BCMA (sBCMA) level or activity (e.g., level) in the subject (e.g., in the serum of the subject) at at least one time point after the subject responded or partially responded to the CAR-expressing cell therapy, e.g., using a method described herein, e.g., ELISA, and
[0135] (ii) (optionally) comparing the sBCMA level or activity (e.g., level) (“sample value”) at the at least one time point with a reference sBCMA level or activity (e.g., level) (“reference value”), wherein:
[0136] (a) an increase from the reference value to the sample value indicates that the cancer is relapsing; and
[0137] (b) the absence of an increase from the reference value to the sample value indicates that indicates that the cancer is not relapsing.

[0138] In one embodiment, the reference value is a sBCMA level or activity (e.g., level) of a sample taken from a subject not having hematological cancer (e.g., a healthy subject). In one embodiment, the reference value is an average sBCMA level or activity (e.g., level) of samples taken from a population of subjects not having hematological cancer (e.g., healthy subjects). In one aspect, disclosed herein is a method of treating a subject having hematological cancer, who has responded or partially responded to a first CAR-expressing cell therapy, comprising measuring soluble BCMA (sBCMA) level or activity (e.g., level) in the subject (e.g., in the serum of the subject) at at least two time points after the subject responded or partially responded to the CAR-expressing cell therapy, e.g., using a method described herein, e.g., ELISA, wherein if the sBCMA level or activity increases over time, administer a second therapy.

[0139] In one embodiment, if the sBCMA level or activity increases at a subsequent (e.g., second, third, fourth, fifth, sixth, or seventh or later) time point relative to a prior (e.g., first, second, third, fourth, fifth, or sixth or later) time point, among the at least two time points, administer a second therapy to the subject.

[0140] In one aspect, disclosed herein is a method of treating a subject having hematological cancer, who has responded or partially responded to a first CAR-expressing cell therapy, comprising:
[0141] (i) measuring soluble BCMA (sBCMA) level or activity (e.g., level) in the subject (e.g., in the serum of the subject) at at least one time point after the subject responded or partially responded to the CAR-expressing cell therapy, e.g., using a method described herein, e.g., ELISA, and
[0142] (ii) (optionally) comparing the sBCMA level or activity (e.g., level) (“sample value”) at the at least one time point with a reference sBCMA level or activity (e.g., level) (“reference value”),
[0143] wherein if the sample value increases from the reference value, administer a second therapy to the subject, thereby treating the subject e, administer a second therapy.

[0144] In one embodiment, the reference value is a sBCMA level or activity (e.g., level) of a sample taken from a subject not having hematological cancer (e.g., a healthy subject). In one embodiment, the reference value is an average sBCMA level or activity (e.g., level) of samples taken from a population of subjects not having hematological cancer (e.g., healthy subjects).

[0145] In one aspect, disclosed herein is a method of treating a subject having hematological cancer, comprising:
[0146] in response to a determination that the subject, after having responded or partially responded to a first CAR-expressing cell therapy, has experienced, or has been identified as having experienced an increase in soluble BCMA (sBCMA) level or activity (e.g., level), e.g., in the serum of the subject, e.g., as measured by a method described herein, e.g., ELISA, administering a second therapy to the subject, thereby treating the subject.

[0147] In one embodiment of the preceding methods, the increase and/or decrease in soluble BCMA (sBCMA) level or activity (e.g., level) is measured by, e.g., multiplexed ELISA, single analyte ELISA, single analyte Luminex, ProteinSimple, Simoa, SomaLogic, Singulex, or Olink.

[0148] In one embodiment of the preceding methods, the second therapy comprises a B cell inhibitor. In one embodiment, the B cell inhibitor is a checkpoint inhibitor. In one embodiment, the B cell inhibitor is a second CAR-expressing cell therapy, wherein:
[0149] (i) the second CAR-expressing cell therapy is the same as the first CAR-expressing cell therapy (e.g., the second CAR-expressing cell therapy is administered at a different dose from the first CAR-expressing cell therapy); or
[0150] (ii) the second CAR-expressing cell therapy is different from the first CAR-expressing cell therapy.

[0151] In one embodiment, the preceding methods comprise discontinuing the first CAR-expressing cell therapy.

[0152] In one embodiment of the preceding methods, the CAR-expressing cell therapy, the first CAR-expressing cell therapy, or the second CAR-expressing cell therapy comprises a plurality of cells that express a CAR molecule. In some embodiments, the CAR molecule is a CAR molecule that binds to a B-cell antigen, e.g., a CD19, BCMA, CD20, CD10, CD22, CD34, CD123, FLT-3, ROR1, CD79b, CD179b, or CD79a.

[0153] In one embodiment, the CAR molecule is:
[0154] (i) a murine CAR molecule that binds to CD19, and wherein the hematological cancer is acute lymphoblastic leukemia (ALL);
[0155] (ii) a humanized CAR molecule that binds to CD19; or
[0156] (iii) a CAR molecule that binds to BCMA.

[0157] In embodiments of any of the preceding methods, the hematological cancer is a B cell malignancy, e.g., chosen from multiple myeloma, chronic lymphocytic leukemia, acute lymphoblastic leukemia, or non-Hodgkins lymphoma. In one embodiment, the hematological cancer is multiple myeloma.

[0158] In embodiments of any of the preceding methods, the at least one or at least two time points are determined at predetermined time intervals, e.g., at an initial phase or a maintenance phase of administration of the CAR molecule. In some embodiments, the at least one or at least two time points (e.g., the sample or reference values) are determined on a weekly basis, e.g., for the first month of CAR therapy, on a monthly basis, e.g., up to six months after initiation of the CAR therapy, or every three months, e.g., up to one, two, three or more years after initiation of the CAR therapy. In some embodiments, the at least two time points (e.g., the sample or reference values) are determined at any combination of the aforesaid time intervals, e.g., such that the first sample or time point is obtained on a weekly basis and the second sample or time point on a monthly basis. Alternatively, the first sample or time point is obtained on a monthly basis and the second sample or time point is obtained every three months, and so on.

[0159] In some embodiments, the soluble BCMA (sBCMA) level or activity (e.g., level) is measured in the subject (e.g., in the serum of the subject), e.g., once every week, e.g., for the first month after the beginning of the CAR-expressing cell therapy, once every month, e.g., up to six months after the beginning of the CAR-expressing cell therapy, or once every three months, e.g., up to one, two, three or more years after the beginning of the CAR-expressing cell therapy. In some embodiments, the soluble BCMA (sBCMA) level or activity (e.g., level) is measured in the subject (e.g., in the serum of the subject), e.g., once every week, e.g., for the first month after the beginning of the CAR-expressing cell therapy, once every month, e.g., from the second month to the sixth month after the beginning of the CAR-expressing cell therapy, and/or once every three months, e.g., from the seventh month up to one, two, three or more years after the beginning of the CAR-expressing cell therapy.

[0160] In some embodiments, an increase in sBCMA level from the reference value or prior time point is indicative of relapse of disease, or minimal residual disease (MRD). In embodiments, an increase in sBCMA level is indicative of MRD after a B cell therapy, e.g., a CD19-targeting therapy or a BCMA-targeting therapy, in B cell malignancies.

[0161] In other aspects, the present disclosure provides a method of evaluating a subject, e.g., evaluating or monitoring the effectiveness of a CAR-expressing cell therapy in a subject, having a cancer, comprising acquiring a value of a soluble BCMA (sBCMA) level or activity in the subject, wherein said value is indicative of the subject's responsiveness or relapsing status to the CAR-expressing cell therapy, thereby evaluating the subject.

[0162] In some aspects, the present disclosure provides a CAR-expressing cell therapy, for use in the treatment of a subject that has been identified as being responsive (e.g., identified as a complete responder, partial responder or a non-relapser) to a therapy comprising a CAR-expressing cell population (e.g., a CAR19-expressing cell population or BCMA-expressing cell population), wherein said identifying comprises acquiring a value of a sBCMA level or activity in the subject.

[0163] In some aspects, the present disclosure provides a method for treating a subject having a cancer, comprising administering to the subject a therapeutically effective dose of a CAR-expressing cell therapy, if the subject is identified as being responsive (e.g., identified as a complete responder, partial responder or a non-relapser) to a therapy comprising a CAR-expressing cell population (e.g., a CAR19-expressing cell population or BCMA-expressing cell population), wherein said identifying comprises acquiring a value of a sBCMA level or activity in the subject, thereby treating the subject.

[0164] In some aspects, the present disclosure provides a method of treating a cancer in a subject, comprising:
[0165] acquiring a value of a sBCMA level or activity in the subject, wherein said value is indicative of the subject's responsiveness or relapsing status to the CAR-expressing cell therapy, and
[0166] responsive to said value, performing one, two, three, four, five, six, seven, or more (e.g., all) of:
[0167] identifying the subject as a responder (e.g., complete responder or partial responder) or non-responder, or a relapser or a non-relapser;
[0168] administering e.g., to a responder or a non-relapser, a CAR-expressing cell therapy;
[0169] administering an altered dosing of a CAR-expressing cell therapy;
[0170] altering the schedule or time course of a CAR-expressing cell therapy;
[0171] administering, e.g., to a non-responder or a partial responder, an additional agent in combination with a CAR-expressing cell therapy, e.g., a checkpoint inhibitor, e.g., a checkpoint inhibitor described herein;
[0172] administering to a non-responder or partial responder a therapy that increases the number of younger T cells or naïve T cells in the subject prior to treatment with a CAR-expressing cell therapy;
[0173] modifying a manufacturing process of a CAR-expressing cell therapy, e.g., enriching for younger T cells or naïve T cells prior to introducing a nucleic acid encoding a CAR, or increasing the transduction efficiency, e.g., for a subject identified as a non-responder or a partial responder;
[0174] administering an alternative therapy, e.g., for a non-responder or partial responder or relapser, e.g., a standard of care for a particular cancer type; or
[0175] if the subject is, or is identified as, a non-responder or a relapser, decreasing the T_{REG} cell population and/or T_{REG} gene signature, e.g., by depleting CD25 cells, or administration of cyclophosphamide, an anti-GITR antibody, an mTOR inhibitor, or a combination thereof.

[0176] The disclosure also provides, in certain aspects, a kit for providing a prognosis for success rate of a CAR-expressing cell therapy in a subject having cancer, said kit comprising:
[0177] a reagent that specifically detects the level or activity of sBCMA, and instructions for using said kit;
[0178] wherein said instructions for use provide that if one or more of the detected expression levels is different from, e.g., lower than a reference level, the subject is more likely to respond positively to a CAR-expressing cell therapy.

[0179] The disclosure also provides, in certain aspects, a system for evaluating cancer in a subject, comprising:
[0180] at least one processor operatively connected to a memory, the at least one processor when executing is configured to:
[0181] acquire a value of a sBCMA level or activity in the subject, and
[0182] responsive to a determination of the value, perform one, two, three, four, five, six, seven, or more (e.g., all) of:
[0183] identify the subject as a responder (e.g., complete responder or partial responder), non-responder, relapser or non-relapser;
[0184] recommend administering a CAR-expressing cell therapy;
[0185] recommend a selection or alteration of a dosing of a CAR-expressing cell therapy;
[0186] recommend a selection or alteration of a schedule or time course of a CAR-expressing cell therapy;
[0187] recommend administering, e.g., to a non-responder or a partial responder, an additional agent in combination with a CAR-expressing cell therapy, e.g., a checkpoint inhibitor, e.g., a checkpoint inhibitor described herein;
[0188] recommend administering to a non-responder or partial responder a therapy that increases the number of naïve T cells in the subject prior to treatment with a CAR-expressing cell therapy;
[0189] recommend modifying a manufacturing process of a CAR-expressing cell therapy, e.g., enrich for naïve T cells prior to introducing a nucleic acid encoding a CAR, e.g., for a subject identified as a non-responder or a partial responder;
[0190] recommend modifying the CAR-expressing cell product prior to infusion into the patient;
[0191] recommend adjusting the CAR-expressing cell infusion dose to achieve clinical efficacy;
[0192] recommend administering an alternative therapy, e.g., for a non-responder or partial responder or relapser;
[0193] recommend a selection of an alternative therapy, e.g., for a non-responder or partial responder, e.g., a standard of care for a particular cancer type; or
[0194] if the subject is, or is identified as, a non-responder or a relapser, recommend decreasing the T_{REG} cell population and/or T_{REG} gene signature, e.g., by CD25 depletion, administration of cyclophosphamide, an anti-GITR antibody, an mTOR inhibitor, or a combination thereof.

[0195] In some aspects, the present disclosure provides a method of evaluating a subject, e.g., evaluating or monitoring CRS status (e.g., the risk or level of CRS) or the effectiveness of a CAR-expressing cell therapy in a subject, having a cancer. The method comprises acquiring a value of a level or activity of one or both of APRIL or BAFF in the subject, wherein said value is indicative of the subject's CRS status, or responsiveness or relapsing status to the CAR-expressing cell therapy, thereby evaluating the subject.

[0196] In some aspects, the present disclosure provides a method of evaluating a subject, e.g., evaluating or monitoring the effectiveness of a CAR-expressing cell therapy in a subject, having a cancer, comprising acquiring a value of an anti-Sox2 antibody level or activity in the subject, wherein said value is indicative of the subject's responsiveness or relapsing status to the CAR-expressing cell therapy, thereby evaluating the subject.

[0197] In some aspects, the present disclosure provides a method of detecting Sox2 antibodies in a subject treated with a CAR-expressing cell therapy, comprising obtaining a biological sample from the subject and contacting the biological sample with an agent that binds Sox2 antibodies, and detecting binding of the agent to a Sox2 antibody.

[0198] The following embodiments can be combined with any of the aspects herein, e.g., any of the BCMA-related or Sox2-related aspects described herein, e.g., any of the BCMA-related or Sox2-related aspects above.

[0199] In embodiments, e.g., embodiments wherein sBCMA is detected, the cancer is multiple myeloma. In another embodiment wherein sBCMA is detected the cancer is a leukemia, e.g., CLL. In another embodiment wherein sBCMA is detected the cancer is ALL or NHL.

[0200] In embodiments, sBCMA is detected using an ELISA assay (e.g., multiplex or single plate), single analyte Luminex assay, ProteinSimple, Simoa, SomaLogic, Singulex, or Olink.

[0201] In embodiments, the value of sBCMA level or activity is obtained from a blood sample, e.g., a serum sample, e.g., a peripheral serum sample. In embodiments, the value of sBCMA level or activity is not obtained from a bone marrow sample. In embodiments, the method comprises obtaining a blood sample from a subject. In embodiments, the method does not comprise obtaining a bone marrow sample from the subject.

[0202] In embodiments, a responder (e.g., complete responder or partial responder, e.g., wherein the cancer is multiple myeloma or CLL) has, or is identified as having, a lower level of sBCMA compared to a reference value, e.g., a non-responder level of sBCMA.

[0203] In other embodiments, a responder (e.g., complete responder or partial responder, e.g., wherein the cancer is ALL or NHL) has, or is identified as having, a higher level of sBCMA compared to a reference value, e.g., a non-responder level of sBCMA. In embodiments, a subject having ALL or NHL has a lower level of sBCMA compared to a reference value, e.g., a level of sBCMA in a non-disease subject.

[0204] In embodiments, the CAR-expressing cell therapy is a BCMA CAR-expressing cell therapy (e.g., for treating multimple myeloma) or a CD19-expressing cell therapy (e.g., for treating multimple myeloma or CLL).

[0205] In embodiments, the method further comprises performing one, two, three, four, five, six, seven, or more (e.g., all) of:
[0206] identifying the subject as a responder (e.g., complete responder or partial responder) or non-responder, or a relapser or a non-relapser;
[0207] administering a CAR-expressing cell therapy;
[0208] administered an altered dosing of a CAR-expressing cell therapy;
[0209] altering the schedule or time course of a CAR-expressing cell therapy;
[0210] administering, e.g., to a non-responder or a partial responder, an additional agent in combination with a CAR-expressing cell therapy, e.g., a checkpoint inhibitor, e.g., a checkpoint inhibitor described herein;
[0211] administering to a non-responder or partial responder a therapy that increases the number of younger T cells in the subject prior to treatment with a CAR-expressing cell therapy;
[0212] modifying a manufacturing process of a CAR-expressing cell therapy, e.g., enriching for younger T cells prior to introducing a nucleic acid encoding a CAR, or increasing the transduction efficiency, e.g., for a subject identified as a non-responder or a partial responder;
[0213] modifying the CAR-expressing cell product prior to infusion into the patient;
[0214] adjusting the CAR-expressing cell infusion dose to achieve clinical efficacy;
[0215] administering an alternative therapy, e.g., for a non-responder or partial responder or relapser;
[0216] administering an alternative therapy, e.g., for a non-responder or partial responder, e.g., a standard of care for a particular cancer type; or
[0217] if the subject is, or is identified as, a non-responder or a relapser, decreasing the T_{REG} cell population and/or T_{REG} gene signature, e.g., by CD25 depletion, administration of cyclophosphamide, anti-GITR antibody, mTOR inhibitor, or a combination thereof.

[0218] In embodiments, the CAR-expressing cell therapy comprises a plurality of CAR-expressing immune effector cells. In embodiments, the CAR-expressing cell therapy is a CAR19 therapy (e.g., CTL019 therapy).

[0219] In embodiments, the value of sBCMA level or activity is obtained from an apheresis sample acquired from the subject, wherein optionally the apheresis sample is evaluated prior to infusion or re-infusion.

[0220] In embodiments, the subject is evaluated prior to, during, or after receiving the CAR-expressing cell therapy.

[0221] In embodiments, the subject is a human patient.

[0222] In embodiments, the method further comprises identifying the subject as a responder (e.g., a complete or partial responder), a non-responder, a relapser or a non-relapser, based on the value of sBCMA level or activity or the value of Sox2 antibody level or activity.

[0223] In embodiments, the kit comprises a reagent for detecting sBCMA protein levels, e.g., an anti-sBCMA antibody molecule.

[0224] In embodiments, Sox2 antibody level or activity is measured in a sample taken from a subject that has received at least one dose of a CAR-expressing cell therapy.

[0225] In embodiments, e.g., embodiments wherein Sox2 antibody is measured, the cancer is multiple myeloma.

[0226] In some aspects, the present disclosure provides a method of evaluating a subject, e.g., evaluating or monitoring the effectiveness of a CAR-expressing cell therapy (e.g., CD19 CAR, e.g., CTL019) in a subject, having a cancer, comprising acquiring a value of a CAR-expressing cell therapy pharmacokinetic measure in the subject, wherein the pharmacokinetic measure is selected from:
[0227] a) peak expansion of CAR-expressing cells, e.g., wherein a peak expansion of over about 3, 3.5, 4, 4.5, or 5 (and optionally up to 6) log₁₀ CAR copies/μg genomic DNA is indicative of response, e.g., CR, PR_{TD}, or PR;
[0228] b) persistence of CAR-expressing cells, e.g., wherein an AUC of over about 300, 350, 400, 450, or 500 (and optionally up to 600 or 700) log₁₀ CAR copies/μg genomic DNA over time (e.g., over 12 months) is indicative of response, e.g., CR, PR_{TD}, or PR; or
[0229] c) in vitro proliferation of CAR-expressing cells, e.g., wherein a CAR-expressing cell fold-expansion of over about 25, 30, 35, 40, 45, 50, 60, 70, 80, 90, or 100 (and optionally up to 100 or 150) fold expansion is indicative of CR, PR_{TD};
[0230] wherein said value is indicative of the subject's responsiveness or relapsing status to the CAR-expressing cell therapy, thereby evaluating the subject.

[0231] In some aspects, the present disclosure provides a method of evaluating a subject, e.g., evaluating or monitoring the effectiveness of a CAR-expressing cell therapy in a subject, having a cancer, comprising acquiring a value of a pro-apoptotic signalling molecule level or activity in the subject, wherein said value is indicative of the subject's responsiveness or relapsing status to the CAR-expressing cell therapy, thereby evaluating the subject.

### Manufacturing

[0232] In certain aspects, the disclosure provides a method of making a cell, comprising transducing an immune effector cell, e.g., a T cell or NK cell, with a vector as described herein, e.g., a vector encoding a CAR. In certain aspects, the disclosure provides a method of making a cell, comprising introducing a nucleic acid as described herein (e.g., a nucleic acid encoding a CAR) into an immune effector cell, e.g., a T cell or NK cell. In certain aspects, the disclosure provides a method of generating a population of RNA-engineered cells comprising introducing an in vitro transcribed RNA or synthetic RNA into a cell, where the RNA comprises a nucleic acid as described herein, e.g., a nucleic acid encoding a CAR.

[0233] In some embodiments, the methods of making disclosed herein further comprise contacting the population of cells, (e.g., CD19 CAR-expressing cells, CD20 CAR-expressing cells, CD22 CAR-expressing cells, B-cell inhibitor cells, or both of CD19 CAR-expressing cells and B-cell inhibitor cells), with a nucleic acid encoding a telomerase subunit, e.g., hTERT. The nucleic acid encoding the telomerase subunit can be DNA.

[0234] In some embodiments, the method of making disclosed herein further comprises culturing the population of cells, (e.g., a population of CAR-expressing cells, e.g., CD19 CAR-expressing cells, or BCMA CAR-expressing cells), in serum comprising 2% hAB serum.

[0235] In some aspects, the present disclosure provides a method of evaluating suitability for manufacturing, e.g., high or low suitability for manufacturing (e.g., predicting high manufacturing success or low manufacturing success, e.g., manufacturing fail) of a CAR-expressing cell product, e.g., CAR19-expressing cell product sample (e.g., CTL019 or CTL119), or BCMA-expressing cell product sample. The method comprises:
[0236] (1) acquiring a sample comprising immune effector cells (e.g., a whole blood sample, peripheral blood sample, or apheresis sample) from a patient having a cancer, e.g., NHL; and
[0237] (2) evaluating the suitability for manufacturing by determining, from the sample, one, two, three, four, five, six, seven, eight, nine or more (e.g., all) of:
   [0238] (i) complete blood count, e.g., complete blood count with differential;
   [0239] (ii) absolute lymphocyte count (ALC);
   [0240] (iii) absolute monocyte count (AMC);
   [0241] (iv) percent or number of lymphocytes;
   [0242] (v) percent or number of neutrophils;
   [0243] (vi) percent or number of CD3+CD45+ cells;
   [0244] (vii) percent or number of monocytes;
   [0245] (viii) percent or number of CD45 dim or CD45 negative cells;
   [0246] (ix) percent or number of CD15+ and/or CXCR2+ cells; or
   [0247] (x) percent or number of suppressive non-lymphoid cell, e.g., myeloid derived suppressor cells (MDSC);
   [0248] wherein low levels of (i), (ii), (iii), (iv), or (vi) or high levels of (v), (vii), (viii), (ix) or (x) are indicative of low suitability for manufacturing, or
   [0249] wherein high levels of (i), (ii), (iii), (iv), or (vi) or low levels of (v), (vii), (viii),
[0250] (ix) or (x) are indicative of high suitability for manufacturing, thereby evaluating the suitability for manufacturing of the CAR-expressing cell product.

[0251] In some aspects, the present disclosure provides a method of evaluating a sample, or a method of manufacturing CAR-expressing cells, comprising:
[0252] (1) acquiring a sample comprising immune effector cells (e.g., a whole blood sample, peripheral blood sample, or apheresis sample) from a patient having a cancer, e.g., NHL; and
[0253] (2) evaluating one, two, three, four, five, six, seven, eight, nine or more (e.g., all) of:
   [0254] (i) complete blood count, e.g., complete blood count with differential;
   [0255] (ii) absolute lymphocyte count;
   [0256] (iii) absolute monocyte count;
   [0257] (iv) percent or number of lymphocytes;
   [0258] (v) percent or number of neutrophils;
   [0259] (vi) percent or number of CD3+CD45+ cells;
   [0260] (vii) percent or number of monocytes;
   [0261] (viii) percent or number of CD45 dim or CD45 negative cells;
   [0262] (ix) percent or number of CD15+ and/or CXCR2+ cells; or
   [0263] (x) percent or number of suppressive non-lymphoid cell, e.g., myeloid derived suppressor cells (MDSC); and
[0264] (3) optionally contacting the cell sample with a nucleic acid encoding CAR molecule, e.g., a CAR molecule described herein, e.g., a CD19 CAR or a BCMA CAR.

[0265] In embodiments of any of the manufacturing or evaluating aspects herein, low levels of (i), (ii), (iii), (iv), or (vi) or high levels of (v) or (vii), (viii), (ix) or (x) are indicative of low suitability for manufacturing.

[0266] In embodiments of any of the manufacturing or evaluating aspects herein, high levels of (i), (ii), (iii), (iv), or (vi) or low levels of (v), (vii), (viii), (ix) or (x) are indicative of high suitability for manufacturing.

[0267] In embodiments of any of the manufacturing or evaluating aspects herein, the method comprises evaluating two of (i), (ii), (iii), (iv), (v), (vi), (vii), (viii), (ix) or (x). In embodiments, the method comprises evaluating three of (i), (ii), (iii), (iv), (v), (vi), (vii), (viii), (ix) or (x). In embodiments, the method comprises evaluating four of (i), (ii), (iii), (iv), (v), (vi), (vii), (viii), (ix) or (x). In embodiments, the method comprises evaluating five of (i), (ii), (iii), (iv), (v), (vi), (vii), (viii), (ix) or (x). In embodiments, the method comprises evaluating six of (i), (ii), (iii), (iv), (v), (vi), (vii), (viii), (ix) or (x). In embodiments, the method comprises evaluating seven of (i), (ii), (iii), (iv), (v), (vi), (vii), (viii), (ix) or (x). In embodiments, the method comprises evaluating eight of (i), (ii), (iii), (iv), (v), (vi), (vii), (viii), (ix) or (x). In embodiments, the method comprises evaluating nine of (i), (ii), (iii), (iv), (v), (vi), (vii), (viii), (ix) or (x). In embodiments, the method comprises evaluating all of (i), (ii), (iii), (iv), (v), (vi), (vii), (viii), (ix) or (x).

[0268] In embodiments of any of the manufacturing or evaluating aspects herein, wherein the absolute lymphocyte count is greater than or equal to 500/ul, the sample is suitable for manufacturing, e.g., the likelihood of manufacturing success is about 93%. In embodiments, wherein the absolute lymphocyte count is <500/ul, there is a reduced suitability for manufacturing, e.g., the likelihood of manufacturing success is about 65%. In embodiments, wherein the absolute lymphocyte count is <300/ul, there is a reduced suitability for manufacturing, e.g., the likelihood of manufacturing success is about 40%. In embodiments, wherein the absolute monocyte count is <500/ul, there is a reduced suitability for manufacturing. In embodiments, wherein the percent lymphocytes is <10%, there is a reduced suitability for manufacturing. In embodiments, wherein the percent lymphocytes is <40%, there is a reduced suitability for manufacturing. In embodiments, wherein the percent neutrophils is >60%, there is a reduced suitability for manufacturing. In embodiments, wherein the percent CD3+CD45+ cells (e.g., determined by flow cytometry) is <25%, there is a reduced suitability for manufacturing. In embodiments, wherein the percent monocytes is >60%, there is a reduced suitability for manufacturing.

[0269] In embodiments of any of the manufacturing or evaluating aspects herein, a sample with high suitability for manufacturing has an at least 50%, 60%, 70%, 80%, or 90% chance of manufacturing success. In embodiments, a sample with low suitability for manufacturing has less than 50%, 40%, 30%, 20%, or 10% chance of manufacturing success. In embodiment, evaluating the likelihood of manufacturing fail comprises identifying the sample as having at least a 50%, 60%, 70%, 80%, or 90% chance of undergoing manufacturing fail. In embodiment, evaluating the likelihood of manufacturing success comprises identifying the sample as having at least a 50%, 60%, 70%, 80%, or 90% chance of undergoing manufacturing success.

[0270] In embodiments of any of the manufacturing or evaluating aspects herein, e.g., embodiments where the sample has a high suitability for manufacturing, the method further comprises manufacturing one or more CAR-expressing cells from a sample from the subject. In one embodiment, the sample is the same sample that was assayed, and in another embodiment, the sample is a different sample from the subject. In embodiments, the method further comprises contacting a cell sample from the subject with a nucleic acid encoding CAR molecule, e.g., a CAR molecule described herein, e.g., a CD19 CAR or a BCMA CAR. In embodiments the method further comprises freezing and thawing the apheresis sample. In embodiments, the method further comprises determining manufacturing fail or manufacturing success, e.g., based on cell expansion, CAR expression, or transduction efficiency. In embodiments, the method further comprises administering the manufactured cells to the subject.

[0271] In embodiments of any of the manufacturing or evaluating aspects herein, (e.g., embodiments where the sample has a low suitability for manufacturing), the method further comprises performing a second apheresis collection from the subject. In embodiments (e.g., embodiments where the sample has a low suitability for manufacturing) the method further comprises performing an enrichment, e.g., a modified enrichment, on the apheresis sample, e.g., the first or second apheresis sample. In embodiments the method further comprises freezing and thawing the apheresis sample, e.g., the first or second apheresis sample. In embodiments, the method further comprises evaluating T cell enrichment and/or decrease in suppressive non-lymphoid cells, e.g., myeloid derived suppressor cells (MDSC), e.g., after the second apheresis collection, e.g., after the enrichment or freezing and thawing, of the sample. In embodiments, a decrease in the level, e.g., percent or number, of CD45 dim or CD45 negative cells, e.g., relative to a reference sample (e.g., the first apheresis collection) is indicative of high suitability for manufacturing. In other embodiments, a decrease in the level, e.g., percent or number, of CD15-positive and/or CXCR2-positive cells, e.g., relative to a reference sample (e.g., the first apheresis collection) is indicative of high suitability for manufacturing.

[0272] In embodiments, (e.g., embodiments where the sample has a low suitability for manufacturing) the method further comprises discarding the cells in the assayed sample. In embodiments, the method further comprises manufacturing one or more CAR-expressing cells from the second apheresis sample. In embodiments, the first apheresis sample underwent manufacturing fail and the second apheresis sample underwent manufacturing success. In embodiments (e.g., embodiments where the sample has a low suitability for manufacturing), the method further comprises manufacturing one or more CAR-expressing cells from a sample from the subject. In one embodiment, the sample is the same sample that was assayed, and in another embodiment, the sample is a different sample from the subject.

[0273] In embodiments of any of the manufacturing or evaluating aspects herein, the method comprises performing or determining one or more of: complete blood count, flow cytometry phenotyping, cell size, and processing pathway on an apheresis sample.

[0274] In embodiments of any of the manufacturing or evaluating aspects herein, the method can further include performing a small scale test expansion (TE) to evaluate manufacturing proliferative capacity, e.g., one or more of cell number, cell phenotype (e.g., a cell phenotype as described herein), or transduction efficiency. In embodiments wherein the absolute lymphocyte count is <500/ul, the small scale test expansion can be used to evaluate suitability for manufacturing, e.g., high or low suitability for manufacturing. Small scale test expansion can be carried out, e.g., using the experimental conditions described in Example 37. For example, an aliquot of the apheresis sample can be obtained and cultured under small scale conditions similar to large scale manufacturing conditions.

[0275] In embodiments, a complete blood count with differential is a complete blood count that identifies the numbers or percentages of different types of blood cells, e.g., white blood cells, e.g., neutrophils, lymphocytes, monocytes, eosinophils, or basophils, in a sample.

[0276] In another aspect, the invention features a method of evaluating or monitoring the suitability of a sample (e.g., an apheresis sample or a manufactured CAR-expressing cell sample) for a CAR therapy (e.g., a CD19 CAR therapy or a BCMA CAR therapy). The method includes acquiring a value of sample suitability, wherein said value is indicative of the suitability of the CAR-expressing cell sample. In embodiments, the value of sample suitability, comprises a measure of the level or activity of a Stat3 signalling mediator (e.g., IL-6, IL-17, IL-22, IL-31, or CCL20 level or activity) in the CAR-expressing cell, wherein said value is indicative of a subject's responsiveness or relapsing status to the CAR-expressing cell, thereby evaluating the sample suitability.

[0277] In another aspect, the invention features a method of evaluating the suitability of a sample (e.g., an apheresis sample) for a CAR therapy (e.g., a CD19 CAR therapy or a BCMA CAR therapy). The method includes acquiring a value of sample suitability, wherein said value is indicative of the suitability of the CAR-expressing cell sample. In embodiments, the value of the sample suitability, comprises a measure of:
[0278] a) Ki-67 and/or granzyme B level, and
[0279] b) optionally, CD8 level,
[0280] c) optionally, CD45RO level, and/or
[0281] d) optionally, CD27 level,
[0282] wherein a Ki-67 level that is lower than a reference (e.g., lower than that in a CD8+CD45RO+CD27+ cell or population of cells) is indicative that a subject will be a CR or PR_{TD} to the CAR-expressing cell, and/or
[0283] wherein a granzyme B level that is higher than a reference (e.g., lower than that in a CD8+CD45RO+CD27+ cell or population of cells) is indicative that a subject will be a CR or PR_{TD} to the CAR-expressing cell.

[0284] In another aspect, the invention features a method of evaluating the suitability of a sample (e.g., an apheresis sample or a manufactured CAR-expressing cell sample) for a CAR therapy (e.g., a CD19 CAR therapy or a BCMA CAR therapy). The method includes acquiring a value of sample suitability, wherein said value is indicative of the suitability of the CAR-expressing cell therapy.

[0285] In embodiments, the value of sample suitability, comprises a measure of the level or activity of:
[0286] (i) CAR,
[0287] (ii) CD8, and
[0288] (iii) CD27, and/or PD1,
[0289] (e.g., CAR+CD8+CD27+PD1−) immune effector cells, e.g., in a T cell population, in a sample (e.g., an apheresis sample or a manufactured CAR-expressing cell product sample).

[0290] In some aspects, the present disclosure provides a method of evaluating a subject, e.g., evaluating or monitoring the effectiveness of a CAR-expressing cell therapy (e.g., CD19 CAR, (e.g., CTL019 or CTL119) or BCMA CAR) in a subject, having a cancer, comprising determining the persistence of the CAR-expressing cell in the subject (e.g., using qPCR or flow cytometry), wherein a persistence that is greater than a reference value (e.g., the average persistence in a NR or PD population) indicates a response, e.g., a complete response.

[0291] In embodiments, persistence is calculated by an area under the curve (AUC), e.g., AUC28 or AUC84. In embodiments (e.g., involving ALL), an AUC of above about 5×10⁵ or 1×10⁶ indicates CR. In embodiments (e.g., involving CLL), an AUC of above about 5×10⁵ or 1×10⁶ indicates CR or PR, and/or an AUC of below about 1×10⁵ or 5×10⁴ indicates NR/PD.

[0292] In embodiments, persistence is measured in the peripheral blood or bone marrow.

[0293] In embodiments, the AUC is determined at a preselected time period after administration of the CAR-expressing cell therapy. In some embodiments, the AUC is determined, e.g., between day 0 and day 45, between day 10 and day 40, between day 15 and day 35, between day 20 and day 30, or between day 0 and ending at day 25, 26, 27, 28, 29, or 30, after administration of the CAR-expressing cell therapy. In some embodiments, the AUC is determined, e.g., between day 0 and day 90, between, or between day 0 and ending at day 80, 82, 84, 85, 86, after administration of the CAR-expressing cell therapy.

[0294] Any of the aforesaid cell samples can be used in a method of treatment or medical use described herein.

### CAR Molecules

[0295] In certain embodiments, the method of treatment comprises a CAR therapy, e.g., administration of one or more cells that express one or more CAR molecules. A cell expressing one or more CAR molecules can be an immune effector cell, e.g., a T cell or NK cell. In an embodiment, the subject is a human.

[0296] In one embodiment, the cell expressing the CAR molecule comprises a vector that includes a nucleic acid sequence encoding the CAR molecule. In one embodiment, the vector is selected from the group consisting of a DNA, an RNA, a plasmid, a lentivirus vector, adenoviral vector, or a retrovirus vector. In one embodiment, the vector is a lentivirus vector. In one embodiment, the vector further comprises a promoter. In one embodiment, the promoter is an EF-1 promoter. In one embodiment, the EF-1 promoter comprises a sequence of SEQ ID NO: 100. In one embodiment, the vector is an in vitro transcribed vector, e.g., a vector that transcribes RNA of a nucleic acid molecule described herein. In one embodiment, the nucleic acid sequence in the in vitro vector further comprises a poly(A) tail, e.g., a poly A tail described herein, e.g., comprising about 150 adenosine bases. In one embodiment, the nucleic acid sequence in the in vitro vector further comprises a 3′UTR, e.g., a 3′ UTR described herein, e.g., comprising at least one repeat of a 3′UTR derived from human beta-globulin. In one embodiment, the nucleic acid sequence in the in vitro vector further comprises promoter. In one embodiment, the nucleic acid sequence comprises a T2A sequence.

[0297] In one embodiment, the cell expressing the CAR molecule is a cell described herein, e.g., a human T cell or a human NK cell, e.g., a human T cell described herein or a human NK cell described herein. In one embodiment, the human T cell is a CD8+ T cell. In one embodiment, the human T cell is a CD4+ T cell. In one embodiment, the human T cell is a CD4+/CD8+ T cell. In one embodiment the human T cell is a mixture of CD8+ and CD4+ T cells. In one embodiment, the cell is an autologous T cell. In one embodiment, the cell is an allogeneic T cell. In one embodiment, the cell is a T cell and the T cell is diacylglycerol kinase (DGK) deficient. In one embodiment, the cell is a T cell and the T cell is Ikaros deficient. In one embodiment, the cell is a T cell and the T cell is both DGK and Ikaros deficient.

[0298] In another embodiment, the cell expressing the CAR molecule, e.g., as described herein, can further express another agent, e.g., an agent which enhances the activity of a CAR-expressing cell.

[0299] In one embodiment, the method includes administering a cell expressing the CAR molecule, as described herein, in combination with an agent which enhances the activity of a CAR-expressing cell, wherein the agent is a cytokine, e.g., IL-7, IL-15, IL-21, or a combination thereof. The cytokine can be delivered in combination with, e.g., simultaneously or shortly after, administration of the CAR-expressing cell. Alternatively, the cytokine can be delivered after a prolonged period of time after administration of the CAR-expressing cell, e.g., after assessment of the subject's response to the CAR-expressing cell.

[0300] For example, in one embodiment, the agent that enhances the activity of a CAR-expressing cell can be an agent which inhibits an immune inhibitory molecule. Examples of immune inhibitory molecules include PD1, PD-L1, CTLA4, TIM3, CEACAM (e.g., CEACAM-1, CEACAM-3 and/or CEACAM-5), LAG3, VISTA, BTLA, TIGIT, LAIR1, CD160, 2B4 and TGF beta. In one embodiment, the agent that inhibits an immune inhibitory molecule comprises a first polypeptide, e.g., an inhibitory molecule, associated with a second polypeptide that provides a positive signal to the cell, e.g., an intracellular signaling domain described herein. In one embodiment, the agent comprises a first polypeptide, e.g., of an immune inhibitory molecule such as PD1, PD-L1, CTLA4, TIM3, CEACAM (e.g., CEACAM-1, CEACAM-3 and/or CEACAM-5), LAG3, VISTA, BTLA, TIGIT, LAIR1, CD160, 2B4 or TGF beta, or a fragment of any of these (e.g., at least a portion of the extracellular domain of any of these), and a second polypeptide which is an intracellular signaling domain described herein (e.g., comprising a costimulatory domain (e.g., 41BB, CD27 or CD28, e.g., as described herein) and/or a primary signaling domain (e.g., a CD3 zeta signaling domain described herein). In one embodiment, the agent comprises a first polypeptide of PD1 or a fragment thereof (e.g., at least a portion of the extracellular domain of PD1), and a second polypeptide of an intracellular signaling domain described herein (e.g., a CD28 signaling domain described herein and/or a CD3 zeta signaling domain described herein).

[0301] In one embodiment, lymphocyte infusion, for example allogeneic lymphocyte infusion, is used in the treatment of the cancer, wherein the lymphocyte infusion comprises at least one CD19 CAR-expressing cell or BCMA CAR-expressing cell described herein and optionally at least one cell expressing a CAR directed against a B-cell antigen. In one embodiment, autologous lymphocyte infusion is used in the treatment of the cancer, wherein the autologous lymphocyte infusion comprises at least one CD19-expressing cell or at least one BCMA-expressing cell, and optionally at least one cell expressing a CAR directed against a B-cell antigen.

[0302] In one embodiment, the CAR expressing cell, e.g., T cell, is administered to a subject that has received a previous stem cell transplantation, e.g., autologous stem cell transplantation, or a subject that has received a previous dose of melphalan.

[0303] In one embodiment, the cell expressing the CAR molecule, e.g., a CAR molecule described herein, is administered in combination with an agent that ameliorates one or more side effect associated with administration of a cell expressing a CAR molecule or with administration of the B-cell inhibitor, e.g., an agent described herein.

[0304] In one embodiment, the cell expressing the CAR molecule, e.g., a CD19 CAR or BCMA CAR molecule described herein, and the B-cell inhibitor are administered in combination with an additional agent that treats the disease associated with CD19, e.g., an additional agent described herein.

[0305] In one embodiment, the cells expressing a CAR molecule, e.g., a CAR molecule described herein, are administered at a dose and/or dosing schedule described herein.

[0306] In one embodiment, the CAR molecule is introduced into T cells, e.g., using in vitro transcription, and the subject (e.g., human) receives an initial administration of cells comprising a CAR molecule, and one or more subsequent administrations of cells comprising a CAR molecule, wherein the one or more subsequent administrations are administered less than 15 days, e.g., 14, 13, 12, 11, 10, 9, 8, 7, 6, 5, 4, 3, or 2 days after the previous administration. In one embodiment, more than one administration of cells comprising a CAR molecule are administered to the subject (e.g., human) per week, e.g., 2, 3, or 4 administrations of cells comprising a CAR molecule are administered per week. In one embodiment, the subject (e.g., human subject) receives more than one administration of cells comprising a CAR molecule per week (e.g., 2, 3 or 4 administrations per week) (also referred to herein as a cycle), followed by a week of no administration of cells comprising a CAR molecule, and then one or more additional administration of cells comprising a CAR molecule (e.g., more than one administration of the cells comprising a CAR molecule per week) is administered to the subject. In another embodiment, the subject (e.g., human subject) receives more than one cycle of cells comprising a CAR molecule, and the time between each cycle is less than 10, 9, 8, 7, 6, 5, 4, or 3 days. In one embodiment, the cells comprising a CAR molecule are administered every other day for 3 administrations per week. In one embodiment, the cells comprising a CAR molecule are administered for at least two, three, four, five, six, seven, eight or more weeks.

[0307] In one embodiment, a population of cells described herein is administered. In some embodiments the population of cells is isolated or purified.

[0308] In one embodiment, the 4-1BB costimulatory domain comprises a sequence of SEQ ID NO: 16. In one embodiment, the 4-1BB costimulatory domain comprises an amino acid sequence having at least one, two or three modifications (e.g., substitutions) but not more than 20, 10 or 5 modifications (e.g., substitutions) of an amino acid sequence of SEQ ID NO: 16, or a sequence with at least 95%, e.g., 95-99%, identity to an amino acid sequence of SEQ ID NO:16. In one embodiment, the 4-1BB costimulatory domain is encoded by a nucleic acid sequence of SEQ ID NO:60, or a sequence with at least 95%, e.g., 95-99%, identity thereof.

[0309] In one embodiment, the CD27 costimulatory domain comprises a sequence of SEQ ID NO: 16. In one embodiment, the CD27 costimulatory domain comprises an amino acid sequence having at least one, two or three modifications (e.g., substitutions) but not more than 20, 10 or 5 modifications (e.g., substitutions) of an amino acid sequence of SEQ ID NO: 16, or a sequence with 95-99% identity to an amino acid sequence of SEQ ID NO:16. In one embodiment, the CD27 costimulatory domain is encoded by a nucleic acid sequence of SEQ ID NO:17, or a sequence with at least 95%, e.g., 95-99%, identity thereof.

[0310] In one embodiment, the CD28 costimulatory domain comprises a sequence of SEQ ID NO: 1317. In one embodiment, the CD28 costimulatory domain comprises an amino acid sequence having at least one, two or three modifications (e.g., substitutions) but not more than 20, 10 or 5 modifications (e.g., substitutions) of an amino acid sequence of SEQ ID NO: 1317, or a sequence with at least 95%, e.g., 95-99%, identity to an amino acid sequence of SEQ ID NO:1317. In one embodiment, the CD28 costimulatory domain is encoded by a nucleic acid sequence of SEQ ID NO:1318, or a sequence with at least 95%, e.g., 95-99%, identity thereof.

[0311] In one embodiment, the wild-type ICOS costimulatory domain comprises a sequence of SEQ ID NO: 1319. In one embodiment, the wild-type ICOS costimulatory domain comprises an amino acid sequence having at least one, two or three modifications (e.g., substitutions) but not more than 20, 10 or 5 modifications (e.g., substitutions) of an amino acid sequence of SEQ ID NO: 1319, or a sequence with at least 95%, e.g., 95-99%, identity to an amino acid sequence of SEQ ID NO: 1319. In one embodiment, the wild-type ICOS costimulatory domain is encoded by a nucleic acid sequence of SEQ ID NO: 1320, or a sequence with at least 95%, e.g., 95-99%, identity thereof.

[0312] In one embodiment, the Y to F mutant ICOS costimulatory domain comprises a sequence of SEQ ID NO: 1321. In one embodiment, the Y to F mutant ICOS costimulatory domain comprises an amino acid sequence having at least one, two or three modifications (e.g., substitutions) but not more than 20, 10 or 5 modifications (e.g., substitutions) of an amino acid sequence of SEQ ID NO: 1321, or a sequence with at least 95%, e.g., 95-99%, identity to an amino acid sequence of SEQ ID NO: 1321. In one embodiment, the Y to F mutant ICOS costimulatory domain is encoded by a nucleic acid sequence with at least 95%, e.g., 95-99%, identity to a nucleic acid sequence of SEQ ID NO:1320 (wherein SEQ ID NO: 1320 encodes wild-type ICOS).

[0313] In embodiments, the primary signaling domain comprises a functional signaling domain of CD3 zeta. In embodiments, the functional signaling domain of CD3 zeta comprises SEQ ID NO: 17 (mutant CD3 zeta) or SEQ ID NO: 43 (wild-type human CD3 zeta).

[0314] In one embodiment, the method includes administering a population of cells wherein at least one cell in the population expresses a CAR, e.g., having an anti-CD19 domain described herein, and an agent which enhances the activity of a CAR-expressing cell, e.g., a second cell expressing the agent which enhances the activity of a CAR-expressing cell. For example, in one embodiment, the agent can be an agent which inhibits an immune inhibitory molecule. Examples of immune inhibitory molecules include PD1, PD-L1, CTLA4, TIM3, CEACAM (e.g., CEACAM-1, CEACAM-3 and/or CEACAM-5), LAG3, VISTA, BTLA, TIGIT, LAIR1, CD160, 2B4 and TGF beta. In one embodiment, the agent that inhibits an immune inhibitory molecule comprises a first polypeptide, e.g., an inhibitory molecule, associated with a second polypeptide that provides a positive signal to the cell, e.g., an intracellular signaling domain described herein. In one embodiment, the agent comprises a first polypeptide, e.g., of an inhibitory molecule such as PD1, PD-L1, CTLA4, TIM3, CEACAM (e.g., CEACAM-1, CEACAM-3 and/or CEACAM-5), LAG3, VISTA, BTLA, TIGIT, LAIR1, CD160, 2B4 or TGF beta, or a fragment of any of these (e.g., at least a portion of an extracellular domain of any of these), and a second polypeptide which is an intracellular signaling domain described herein (e.g., comprising a costimulatory domain (e.g., 41BB, CD27 or CD28, e.g., as described herein) and/or a primary signaling domain (e.g., a CD3 zeta signaling domain described herein). In one embodiment, the agent comprises a first polypeptide of PD1 or a fragment thereof (e.g., at least a portion of the extracellular domain of PD1), and a second polypeptide of an intracellular signaling domain described herein (e.g., a CD28 signaling domain described herein and/or a CD3 zeta signaling domain described herein).

[0315] In an embodiment, the method further comprises transplanting a cell, e.g., a hematopoietic stem cell, or a bone marrow, into the mammal.

[0316] In one embodiment, the method includes administering a population of cells comprising a CAR described herein, e.g., a CAR having an anti-CD19 domain described herein, and an agent which enhances the activity of a CAR-expressing cell, wherein the agent is a cytokine, e.g., IL-7, IL-15, IL-21, or a combination thereof. The cytokine can be delivered in combination with, e.g., simultaneously or shortly after, administration of the CAR-expressing cell(s). Alternatively, the cytokine can be delivered after a prolonged period of time after administration of the CAR-expressing cell(s), e.g., after assessment of the subject's response to the CAR-expressing cell(s). Related compositions for use and methods of making a medicament are also provided.

[0317] In an embodiment, the composition is a pharmaceutically acceptable composition.

[0318] In some embodiment, the CAR molecules described herein include a binding domain, e.g., a CD19- or BCMA-binding domain as described herein.

[0319] In one embodiment, the CAR molecule comprises a transmembrane domain of a protein selected from the group consisting of the alpha, beta or zeta chain of the T-cell receptor, CD28, CD3 epsilon, CD45, CD4, CD5, CD8, CD9, CD16, CD22, CD33, CD37, CD64, CD80, CD86, CD134, CD137 and CD154. In one embodiment, the transmembrane domain comprises a sequence of SEQ ID NO: 15. In one embodiment, the transmembrane domain comprises an amino acid sequence having at least one, two or three modifications (e.g., substitutions) but not more than 20, 10 or 5 modifications (e.g., substitutions) of an amino acid sequence of SEQ ID NO: 15, or a sequence with 95-99% identity to an amino acid sequence of SEQ ID NO: 15.

[0320] In one embodiment, the binding domain is connected to the transmembrane domain by a hinge region, e.g., a hinge region described herein. In one embodiment, the encoded hinge region comprises SEQ ID NO:14 or SEQ ID NO:45, or a sequence with 95-99% identity thereof.

[0321] In one embodiment, the CAR molecule further comprises a sequence encoding a costimulatory domain, e.g., a costimulatory domain described herein. In one embodiment, the costimulatory domain comprises a functional signaling domain of a protein selected from the group consisting of OX40, CD2, CD27, CD28, CDS, ICAM-1, LFA-1 (CD11a/CD18), ICOS (CD278), and 4-1BB (CD137). In one embodiment, the costimulatory domain comprises a sequence of SEQ ID NO: 16. In one embodiment, the costimulatory domain comprises a sequence of SEQ ID NO:51. In one embodiment, the costimulatory domain comprises an amino acid sequence having at least one, two or three modifications (e.g., substitutions) but not more than 20, 10 or 5 modifications (e.g., substitutions) of an amino acid sequence of SEQ ID NO: 16 or SEQ ID NO:51, or a sequence with at least 95%, e.g., 95-99%, identity to an amino acid sequence of SEQ ID NO: 16 or SEQ ID NO:51. In one embodiment, the costimulatory domain comprises a functional signaling domain of a protein selected from the group consisting of MHC class I molecule, TNF receptor proteins, Immunoglobulin-like proteins, cytokine receptors, integrins, signaling lymphocytic activation molecules (SLAM proteins), activating NK cell receptors, BTLA, a Toll ligand receptor, OX40, CD2, CD7, CD27, CD28, CD30, CD40, CDS, ICAM-1, LFA-1 (CD11a/CD18), 4-1BB (CD137), B7-H3, CDS, ICAM-1, ICOS (CD278), GITR, BAFFR, LIGHT, HVEM (LIGHTR), KIRDS2, SLAMF7, NKp80 (KLRF1), NKp44, NKp30, NKp46, CD19, CD4, CD8alpha, CD8beta, IL2R beta, IL2R gamma, IL7R alpha, ITGA4, VLA1, CD49a, ITGA4, IA4, CD49D, ITGA6, VLA-6, CD49f, ITGAD, CD11d, ITGAE, CD103, ITGAL, CD11a, LFA-1, ITGAM, CD11b, ITGAX, CD11c, ITGB1, CD29, ITGB2, CD18, LFA-1, ITGB7, NKG2D, NKG2C, TNFR2, TRANCE/RANKL, DNAM1 (CD226), SLAMF4 (CD244, 2B4), CD84, CD96 (Tactile), CEACAM1, CRTAM, Ly9 (CD229), CD160 (BY55), PSGL1, CD100 (SEMA4D), CD69, SLAMF6 (NTB-A, Ly108), SLAM (SLAMF1, CD150, IPO-3), BLAME (SLAMF8), SELPLG (CD162), LTBR, LAT, GADS, SLP-76, PAG/Cbp, CD19a, and a ligand that specifically binds with CD83. In embodiments, the costimulatory domain comprises 4-1BB, CD27, CD28, or ICOS. In one embodiment, the CAR molecule further comprises a sequence encoding an intracellular signaling domain, e.g., an intracellular signaling domain described herein. In one embodiment, the intracellular signaling domain comprises a functional signaling domain of 4-1BB and/or a functional signaling domain of CD3 zeta. In one embodiment, the intracellular signaling domain comprises the sequence of SEQ ID NO: 16 and/or the sequence of SEQ ID NO:17. In one embodiment, the intracellular signaling domain comprises the sequence of SEQ ID NO:16 and/or the sequence of SEQ ID NO:43. In one embodiment, the intracellular signaling domain comprises a functional signaling domain of CD27 and/or a functional signaling domain of CD3 zeta. In one embodiment, the intracellular signaling domain comprises the sequence of SEQ ID NO: 51 and/or the sequence of SEQ ID NO:17. In one embodiment, the intracellular signaling domain comprises the sequence of SEQ ID NO:51 and/or the sequence of SEQ ID NO:43. In one embodiment, the intracellular signaling domain comprises an amino acid sequence having at least one, two or three modifications (e.g., substitutions) but not more than 20, 10 or 5 modifications (e.g., substitutions) of an amino acid sequence of SEQ ID NO:16 or SEQ ID NO:51 and/or an amino acid sequence of SEQ ID NO:17 or SEQ ID NO:43, or a sequence with at least 95%, e.g., 95-99%, identity to an amino acid sequence of SEQ ID NO:16 or SEQ ID NO:51 and/or an amino acid sequence of SEQ ID NO:17 or SEQ ID NO:43. In one embodiment, the intracellular signaling domain comprises the sequence of SEQ ID NO:16 or SEQ ID NO:51 and the sequence of SEQ ID NO: 17 or SEQ ID NO:43, wherein the sequences comprising the intracellular signaling domain are expressed in the same frame and as a single polypeptide chain.

[0322] In one embodiment, the CAR molecule further comprises a leader sequence, e.g., a leader sequence described herein. In one embodiment, the leader sequence comprises an amino acid sequence of SEQ ID NO: 13, or a sequence with 95-99% identity to an amino acid sequence of SEQ ID NO:13.

[0323] In one aspect, the CAR (e.g., a CD19 CAR or a BCMA CAR) comprises an optional leader sequence (e.g., an optional leader sequence described herein), an extracellular antigen binding domain, a hinge (e.g., hinge described herein), a transmembrane domain (e.g., transmembrane domain described herein), and an intracellular stimulatory domain (e.g., intracellular stimulatory domain described herein). In one aspect an exemplary CAR construct comprises an optional leader sequence (e.g., a leader sequence described herein), an extracellular antigen binding domain, a hinge, a transmembrane domain, an intracellular costimulatory domain (e.g., an intracellular costimulatory domain described herein) and an intracellular stimulatory domain.

[0324] CAR which comprises a transmembrane domain that comprises a transmembrane domain of a protein selected from the group consisting of the alpha, beta or zeta chain of the T-cell receptor, CD28, CD3 epsilon, CD45, CD4, CD5, CD8, CD9, CD16, CD22, CD33, CD37, CD64, CD80, CD86, CD134, CD137 and CD154. In embodiments, the antigen binding domain is connected to the transmembrane domain by a hinge region. In embodiments, the hinge region comprises SEQ ID NO:14, or a sequence with 95-99% identity thereof. In embodiments, the costimulatory domain is a functional signaling domain obtained from a protein selected from the group consisting of OX40, CD2, CD27, CD28, CDS, ICAM-1, LFA-1 (CD11a/CD18), ICOS (CD278), and 4-1BB (CD137). In embodiments, the costimulatory domain is a functional signaling domain obtained from a protein selected from the group consisting of MHC class I molecule, TNF receptor proteins, Immunoglobulin-like proteins, cytokine receptors, integrins, signaling lymphocytic activation molecules (SLAM proteins), activating NK cell receptors, BTLA, a Toll ligand receptor, OX40, CD2, CD7, CD27, CD28, CD30, CD40, CDS, ICAM-1, LFA-1 (CD11a/CD18), 4-1BB (CD137), B7-H3, CDS, ICAM-1, ICOS (CD278), GITR, BAFFR, LIGHT, HVEM (LIGHTR), KIRDS2, SLAMF7, NKp80 (KLRF1), NKp44, NKp30, NKp46, CD19, CD4, CD8alpha, CD8beta, IL2R beta, IL2R gamma, IL7R alpha, ITGA4, VLA1, CD49a, ITGA4, IA4, CD49D, ITGA6, VLA-6, CD49f, ITGAD, CD11d, ITGAE, CD103, ITGAL, CD11a, LFA-1, ITGAM, CD11b, ITGAX, CD11c, ITGB1, CD29, ITGB2, CD18, LFA-1, ITGB7, NKG2D, NKG2C, TNFR2, TRANCE/RANKL, DNAM1 (CD226), SLAMF4 (CD244, 2B4), CD84, CD96 (Tactile), CEACAM1, CRTAM, Ly9 (CD229), CD160 (BY55), PSGL1, CD100 (SEMA4D), CD69, SLAMF6 (NTB-A, Ly108), SLAM (SLAMF1, CD150, IPO-3), BLAME (SLAMF8), SELPLG (CD162), LTBR, LAT, GADS, SLP-76, PAG/Cbp, CD19a, and a ligand that specifically binds with CD83. In embodiments, the costimulatory domain comprises a sequence of SEQ ID NO:16 or SEQ ID NO:51. In embodiments, the intracellular signaling domain comprises a functional signaling domain of 4-1BB and/or a functional signaling domain of CD3 zeta.

[0325] In embodiments, the intracellular signaling domain comprises the sequence of SEQ ID NO: 16 and/or the sequence of SEQ ID NO:17 or SEQ ID NO:43. In embodiments, the CAR further comprises a leader sequence. In embodiments, the leader sequence comprises SEQ ID NO: 13.

[0326] In embodiments, the cells that express the CAR molecule comprise T cells or NK cells.

### CD19 Inhibitors

[0327] In embodiments, the CD19 inhibitor is a small molecule, an antibody, a fragment of an antibody, or a cell therapy, e.g., a cell that expresses a CAR molecule comprising an anti-CD19 binding domain.

[0328] In one embodiment, the cell expresses a CAR molecule comprising an anti-CD19 binding domain (e.g., a murine or humanized antibody or antibody fragment that specifically binds to CD19), a transmembrane domain, and an intracellular signaling domain (e.g., an intracellular signaling domain comprising a costimulatory domain and/or a primary signaling domain). In one embodiment, the CAR comprises an antibody or antibody fragment which includes an anti-CD19 binding domain described herein (e.g., a murine or humanized antibody or antibody fragment that specifically binds to CD19 as described herein), a transmembrane domain described herein, and an intracellular signaling domain described herein (e.g., an intracellular signaling domain comprising a costimulatory domain and/or a primary signaling domain described herein).

[0329] In one embodiment, the CAR molecule comprises an anti-CD19 binding domain comprising one or more (e.g., all three) light chain complementary determining region 1 (LC CDR1), light chain complementary determining region 2 (LC CDR2), and light chain complementary determining region 3 (LC CDR3) of an anti-CD19 binding domain described herein, and one or more (e.g., all three) heavy chain complementary determining region 1 (HC CDR1), heavy chain complementary determining region 2 (HC CDR2), and heavy chain complementary determining region 3 (HC CDR3) of an anti-CD19 binding domain described herein, e.g., an anti-CD19 binding domain comprising one or more, e.g., all three, LC CDRs and one or more, e.g., all three, HC CDRs. In one embodiment, the anti-CD19 binding domain comprises one or more (e.g., all three) heavy chain complementary determining region 1 (HC CDR1), heavy chain complementary determining region 2 (HC CDR2), and heavy chain complementary determining region 3 (HC CDR3) of an anti-CD19 binding domain described herein, e.g., the anti-CD19 binding domain has two variable heavy chain regions, each comprising a HC CDR1, a HC CDR2 and a HC CDR3 described herein. In one embodiment, the anti-CD19 binding domain comprises a murine light chain variable region described herein (e.g., in Table 3) and/or a murine heavy chain variable region described herein (e.g., in Table 3). In one embodiment, the anti-CD19 binding domain is a scFv comprising a murine light chain and a murine heavy chain of an amino acid sequence of Table 3. In an embodiment, the anti-CD19 binding domain (e.g., an scFv) comprises: a light chain variable region comprising an amino acid sequence having at least one, two or three modifications (e.g., substitutions) but not more than 30, 20 or 10 modifications (e.g., substitutions) of an amino acid sequence of a light chain variable region provided in Table 3, or a sequence with at least 95%, e.g., 95-99%, identity with an amino acid sequence of Table 3; and/or a heavy chain variable region comprising an amino acid sequence having at least one, two or three modifications (e.g., substitutions) but not more than 30, 20 or 10 modifications (e.g., substitutions) of an amino acid sequence of a heavy chain variable region provided in Table 3, or a sequence with 95-99% identity to an amino acid sequence of Table 3. In one embodiment, the anti-CD19 binding domain comprises a sequence of SEQ ID NO:59, or a sequence with at least 95%, e.g., 95-99%, identity thereof. In one embodiment, the anti-CD19 binding domain is a scFv, and a light chain variable region comprising an amino acid sequence described herein, e.g., in Table 3, is attached to a heavy chain variable region comprising an amino acid sequence described herein, e.g., in Table 3, via a linker, e.g., a linker described herein. In one embodiment, the anti-CD19 binding domain includes a (Gly₄-Ser)n linker, wherein n is 1, 2, 3, 4, 5, or 6, e.g., 3 or 4 (SEQ ID NO: 53). The light chain variable region and heavy chain variable region of a scFv can be, e.g., in any of the following orientations: light chain variable region-linker-heavy chain variable region or heavy chain variable region-linker-light chain variable region.

[0330] In one embodiment, the CAR molecule comprises a humanized anti-CD19 binding domain that includes one or more (e.g., all three) light chain complementary determining region 1 (LC CDR1), light chain complementary determining region 2 (LC CDR2), and light chain complementary determining region 3 (LC CDR3) of a humanized anti-CD19 binding domain described herein, and one or more (e.g., all three) heavy chain complementary determining region 1 (HC CDR1), heavy chain complementary determining region 2 (HC CDR2), and heavy chain complementary determining region 3 (HC CDR3) of a humanized anti-CD19 binding domain described herein, e.g., a humanized anti-CD19 binding domain comprising one or more, e.g., all three, LC CDRs and one or more, e.g., all three, HC CDRs. In one embodiment, the humanized anti-CD19 binding domain comprises at least HC CDR2. In one embodiment, the humanized anti-CD19 binding domain comprises one or more (e.g., all three) heavy chain complementary determining region 1 (HC CDR1), heavy chain complementary determining region 2 (HC CDR2), and heavy chain complementary determining region 3 (HC CDR3) of a humanized anti-CD19 binding domain described herein, e.g., the humanized anti-CD19 binding domain has two variable heavy chain regions, each comprising a HC CDR1, a HC CDR2 and a HC CDR3 described herein. In one embodiment, the humanized anti-CD19 binding domain comprises at least HC CDR2. In one embodiment, the light chain variable region comprises one, two, three or all four framework regions of VK3_L25 germline sequence. In one embodiment, the light chain variable region has a modification (e.g., substitution, e.g., a substitution of one or more amino acid found in the corresponding position in the murine light chain variable region of SEQ ID NO: 58, e.g., a substitution at one or more of positions 71 and 87). In one embodiment, the heavy chain variable region comprises one, two, three or all four framework regions of VH4_4-59 germline sequence. In one embodiment, the heavy chain variable region has a modification (e.g., substitution, e.g., a substitution of one or more amino acid found in the corresponding position in the murine heavy chain variable region of SEQ ID NO: 58, e.g., a substitution at one or more of positions 71, 73 and 78). In one embodiment, the humanized anti-CD19 binding domain comprises a light chain variable region described herein (e.g., in Table 2) and/or a heavy chain variable region described herein (e.g., in Table 2). In one embodiment, the humanized anti-CD19 binding domain is a scFv comprising a light chain and a heavy chain of an amino acid sequence of Table 2. In an embodiment, the humanized anti-CD19 binding domain (e.g., an scFv) comprises: a light chain variable region comprising an amino acid sequence having at least one, two or three modifications (e.g., substitutions) but not more than 30, 20 or 10 modifications (e.g., substitutions) of an amino acid sequence of a light chain variable region provided in Table 2, or a sequence with at least 95%, e.g., 95-99%, identity with an amino acid sequence of Table 2; and/or a heavy chain variable region comprising an amino acid sequence having at least one, two or three modifications (e.g., substitutions) but not more than 30, 20 or 10 modifications (e.g., substitutions) of an amino acid sequence of a heavy chain variable region provided in Table 2, or a sequence with at least 95%, e.g., 95-99%, identity to an amino acid sequence of Table 2. In one embodiment, the humanized anti-CD19 binding domain comprises a sequence selected from a group consisting of SEQ ID NO:1, SEQ ID NO:2, SEQ ID NO:3, SEQ ID NO: 4, SEQ ID NO:5, SEQ ID NO:6, SEQ ID NO:7, SEQ ID NO:8, SEQ ID NO:9, SEQ ID NO:10, SEQ ID NO:11 and SEQ ID NO:12, or a sequence with 95-99% identity thereof. In one embodiment, the humanized anti-CD19 binding domain is a scFv, and a light chain variable region comprising an amino acid sequence described herein, e.g., in Table 2, is attached to a heavy chain variable region comprising an amino acid sequence described herein, e.g., in Table 2, via a linker, e.g., a linker described herein. In one embodiment, the humanized anti-CD19 binding domain includes a (Gly₄-Ser)n linker, wherein n is 1, 2, 3, 4, 5, or 6, e.g., 3 or 4 (SEQ ID NO: 53). The light chain variable region and heavy chain variable region of a scFv can be, e.g., in any of the following orientations: light chain variable region-linker-heavy chain variable region or heavy chain variable region-linker-light chain variable region.

[0331] In one embodiment of the preceding methods, the murine CAR molecule that binds to CD19 comprises:
[0332] (i) one or more of (e.g., all three of) heavy chain complementary determining region 1 (HCDR1), HCDR2, and HCDR3 of any CD19 scFv domain amino acid sequence listed in Table 3 and one or more of (e.g., all three of) light chain complementary determining region 1 (LCDR1), LCDR2, and LCDR3 of any CD19 scFv domain amino acid sequence listed in Table 3,
[0333] (ii) a heavy chain variable region (VH) of any CD19 scFv domain amino acid sequence listed in Table 3 and a light chain variable region (VL) of any CD19 scFv domain amino acid sequence listed in Table 3,
[0334] (iii) a CD19 scFv domain amino acid sequence listed in Table 3 (e.g., SEQ ID NO: 59, 109, 111, or 114), or
[0335] (iv) a full-length CD19 CAR amino acid sequence listed in Table 3 (e.g., SEQ ID NO: 110, 112, 113, or 115, or residues 22-486 of SEQ ID NO: 58).

[0336] In one embodiment of the preceding methods, the humanized CAR molecule that binds to CD19 comprises:
[0337] (i) one or more of (e.g., all three of) heavy chain complementary determining region 1 (HCDR1), HCDR2, and HCDR3 of any CD19 scFv domain amino acid sequence listed in Table 2 and one or more of (e.g., all three of) light chain complementary determining region 1 (LCDR1), LCDR2, and LCDR3 of any CD19 scFv domain amino acid sequence listed in Table 2,
[0338] (ii) a heavy chain variable region (VH) of any CD19 scFv domain amino acid sequence listed in Table 2 and a light chain variable region (VL) of any CD19 scFv domain amino acid sequence listed in Table 2,
[0339] (iii) a CD19 scFv domain amino acid sequence listed in Table 2 (e.g., any one of SEQ ID NOs: 1-12), or
[0340] (iv) a full-length CD19 CAR amino acid sequence listed in Table 2 (e.g., residues 22-486 of any one of SEQ ID NOs: 31-34 or 42, or residues 22-491 of any one of SEQ ID NOs: 35-41).

[0341] In one embodiment, the CAR molecule comprises an anti-CD19 binding domain that includes one or more (e.g., 2, 3, 4, 5, or 6) LC CDR1, LC CDR2, LC CDR3, HC CDR1, HC CDR2, and HC CDR3 of a construct of Table 4 and 5, e.g., murine_CART19, humanized_CART19 a, humanized_CART19 b, or humanized_CART19 c.

[0342] In one embodiment, the CAR molecule comprises a leader sequence, e.g., a leader sequence described herein, e.g., a leader sequence of SEQ ID NO: 13, or having 95-99% identity thereof; an anti-CD19 binding domain described herein, e.g., an anti-CD19 binding domain comprising a LC CDR1, a LC CDR2, a LC CDR3, a HC CDR1, a HC CDR2 and a HC CDR3 described herein, e.g., a murine anti-CD19 binding domain described in Table 3, e.g., CTL019, a humanized anti-CD19 binding domain described in Table 2, e.g., CTL119, or a sequence with at least 95%, e.g., 95-99%, identity thereof; a hinge region, e.g., a hinge region described herein, e.g., a hinge region of SEQ ID NO:14 or having at least 95%, e.g., 95-99%, identity thereof; a transmembrane domain, e.g., a transmembrane domain described herein, e.g., a transmembrane domain having a sequence of SEQ ID NO:15 or a sequence having at least 95%, e.g., 95-99%, identity thereof; an intracellular signaling domain, e.g., an intracellular signaling domain described herein (e.g., an intracellular signaling domain comprising a costimulatory domain and/or a primary signaling domain). In one embodiment, the intracellular signaling domain comprises a costimulatory domain, e.g., a costimulatory domain described herein, e.g., a 4-1BB costimulatory domain having a sequence of SEQ ID NO:16 or SEQ ID NO:51, or having at least 95%, e.g., 95-99%, identity thereof, and/or a primary signaling domain, e.g., a primary signaling domain described herein, e.g., a CD3 zeta stimulatory domain having a sequence of SEQ ID NO:17 or SEQ ID NO:43, or having at least 95%, e.g., 95-99%, identity thereof.

[0343] In one embodiment, the CAR molecule comprises (e.g., consists of) an amino acid sequence of SEQ ID NO:58, SEQ ID NO:31, SEQ ID NO:32, SEQ ID NO:33, SEQ ID NO:34, SEQ ID NO:35, SEQ ID NO:36, SEQ ID NO:37, SEQ ID NO:38, SEQ ID NO:39, SEQ ID NO:40, SEQ ID NO:41 or SEQ ID NO:42, or an amino acid sequence having at least one, two, three, four, five, 10, 15, 20 or 30 modifications (e.g., substitutions) but not more than 60, 50 or 40 modifications (e.g., substitutions) of an amino acid sequence of SEQ ID NO:58, SEQ ID NO:31, SEQ ID NO:32, SEQ ID NO:33, SEQ ID NO:34, SEQ ID NO:35, SEQ ID NO:36, SEQ ID NO:37, SEQ ID NO:38, SEQ ID NO:39, SEQ ID NO:40, SEQ ID NO:41 or SEQ ID NO:42, or an amino acid sequence having 85%, 90%, 95%, 96%, 97%, 98% or 99% identity to an amino acid sequence of SEQ ID NO:58, SEQ ID NO:31, SEQ ID NO:32, SEQ ID NO:33, SEQ ID NO:34, SEQ ID NO:35, SEQ ID NO:36, SEQ ID NO:37, SEQ ID NO:38, SEQ ID NO:39, SEQ ID NO:40, SEQ ID NO:41 or SEQ ID NO:42.

[0344] In some embodiments, the CD19 inhibitor comprises an antibody molecule having, e.g., an antibody molecule having a CD19-binding sequence as described herein. For instance, the antibody molecule may comprise CDRs or a VH and VL as described in any of Tables 2, 3, 4, and 5, or a sequence with homology thereto, e.g., having at least 95%, e.g., 95-99%, identity thereto. The antibody molecule may comprise a CD19-binding region having a sequence described in this section, e.g., in the context of a CAR.

[0345] In some embodiments, the CD19 inhibitor, e.g., the CD19 CAR, can be used to treat a hematological malignancy. In embodiments, the CD19 inhibitor, e.g., the CD19 CAR, can be used to treat a disease associated with CD19 expression.

[0346] In one embodiment, the disease associated with CD19 expression is selected from a proliferative disease such as a cancer or malignancy or a precancerous condition such as a myelodysplasia, a myelodysplastic syndrome or a preleukemia, or is a non-cancer related indication associated with expression of CD19. In one embodiment, the disease is a solid or a liquid tumor. In one embodiment, the cancer is a pancreatic cancer. In one embodiment, the disease is a hematologic cancer. In one embodiment, the hematologic cancer is a leukemia. In one embodiment, the cancer is selected from the group consisting of one or more acute leukemias including but not limited to B-cell acute lymphoblastic leukemia (BALL), T-cell acute lymphoblastic leukemia (TALL), small lymphocytic leukemia (SLL), acute lymphoblastic leukemia (ALL) (e.g., relapsing and refractory ALL); one or more chronic leukemias including but not limited to chronic myelogenous leukemia (CML), and chronic lymphocytic leukemia (CLL). Additional hematologic cancers or conditions include, but are not limited to mantle cell lymphoma (MCL), B cell prolymphocytic leukemia, blastic plasmacytoid dendritic cell neoplasm, Burkitt's lymphoma, diffuse large B cell lymphoma, follicular lymphoma, hairy cell leukemia, small cell- or a large cell-follicular lymphoma, malignant lymphoproliferative conditions, MALT lymphoma, Marginal zone lymphoma, multiple myeloma, myelodysplasia and myelodysplastic syndrome, non-Hodgkin lymphoma, Hodgkin lymphoma, plasmablastic lymphoma, plasmacytoid dendritic cell neoplasm, Waldenstrom macroglobulinemia, and “preleukemia.” Preleukemia encompasses a diverse collection of hematological conditions united by ineffective production (or dysplasia) of myeloid blood cells In embodiments, a disease associated with CD19 expression include, but not limited to atypical and/or non-classical cancers, malignancies, precancerous conditions or proliferative diseases expressing CD19; and any combination thereof.

[0347] In one embodiment, the disease associated with expression of CD19 is a lymphoma, e.g., MCL or Hodgkin lymphoma. In one embodiment, the disease associated with expression of CD19 is leukemia, e.g., SLL, CLL and/or ALL.

[0348] In an embodiment, the subject (e.g., a subject to be treated with a CD19 CAR, optionally in combination with a second agent such as a PD1 inhibitor or PD-L1 inhibitor) has, or is identified as having, at least 5%, 6%, 7%, 8%, 9%, 10%, 20%, 30%, 40%, 50%, 60%, 70%, 80%, or 90% of cancer cells, e.g., DLBCL cells, which are CD3+/PD1+.

[0349] In an embodiment, the subject has relapsed or is identified as having relapsed after treatment with the one or more cells that express a CAR molecule that binds CD19, e.g., a CD19 CAR. In an embodiment, the subject has relapsed or is identified as having relapsed based on one or more of reappearance of blasts in the blood, bone marrow (>5%), or any extramedullary site, after a complete response. In an embodiment, the subject has relapsed or is identified as having relapsed based on detection of CD19-blasts above a predetermined threshold, e.g., over 1%, 2%, 3%, 4%, 5%, or 10%.

### BCMA Inhibitors

[0350] In embodiments the BCMA CAR comprises an anti-BCMA binding domain (e.g., human or humanized anti-BCMA binding domain), a transmembrane domain, and an intracellular signaling domain, and wherein said anti-BCMA binding domain comprises a heavy chain complementary determining region 1 (HC CDR1), a heavy chain complementary determining region 2 (HC CDR2), and a heavy chain complementary determining region 3 (HC CDR3) of any anti-BMCA heavy chain binding domain amino acid sequences listed in Table 4D or 4E. In embodiments, the anti-BCMA binding domain comprises a light chain variable region described herein (e.g., in Table 4D or 4E) and/or a heavy chain variable region described herein (e.g., in Table 4D or 4E). In some embodiments, the CDRs are defined according to the Kabat numbering scheme, the Chothia numbering scheme, or a combination thereof.

[0351] In one embodiment of the preceding methods, the CAR molecule that binds to BCMA comprises:
[0352] (i) one or more of (e.g., all three of) heavy chain complementary determining region 1 (HCDR1), HCDR2, and HCDR3 of any CD19 scFv domain amino acid sequence listed in Table 4D or 4E and one or more of (e.g., all three of) light chain complementary determining region 1 (LCDR1), LCDR2, and LCDR3 of any CD19 scFv domain amino acid sequence listed in Table 4D or 4E,
[0353] (ii) a heavy chain variable region (VH) listed in Table 4D or 4E and a light chain variable region (VL) listed in Table 4D or 4E,
[0354] (iii) a BCMA scFv domain amino acid sequence listed in Table 4D or 4E (e.g., any one of SEQ ID NOs: 1400, 1406, 1412, 1418, 1424, 1430, 1436, 1442, 1448, 1454, 1460, 1466, 1472, 1478, 1485, 1491, 1497, 1503, 1509, 1515, 1521, 1527, 1533, 1539, 1545, 1551, 1557, 1563, 1569, 1575, 1581, 1587, 1593, 1599, 1605, 1611, 1619, 1623, 1627, or 1631), or (iv) a full-length BCMA CAR amino acid sequence listed in Table 4D or 4E (e.g., residues 22-483 of SEQ ID NO: 1404, residues 22-490 of SEQ ID NO: 1410, residues 22-488 of SEQ ID NO: 1416, residues 22-487 of SEQ ID NO: 1422, residues 22-493 of SEQ ID NO: 1428, residues 22-490 of SEQ ID NO: 1434, residues 22-491 of SEQ ID NO: 1440, residues 22-482 of SEQ ID NO: 1446, residues 22-483 of SEQ ID NO: 1452, residues 22-485 of SEQ ID NO: 1458, residues 22-483 of SEQ ID NO: 1464, residues 22-490 of SEQ ID NO: 1470, residues 22-483 of SEQ ID NO: 1476, residues 22-484 of SEQ ID NO: 1483, residues 22-485 of SEQ ID NO: 1489, residues 22-487 of SEQ ID NO: 1495, residues 23-489 of SEQ ID NO: 1501, residues 22-490 of SEQ ID NO: 1507, residues 22-484 of SEQ ID NO: 1513, residues 22-485 of SEQ ID NO: 1519, residues 22-489 of SEQ ID NO: 1525, residues 22-497 of SEQ ID NO: 1531, residues 22-492 of SEQ ID NO: 1537, residues 22-490 of SEQ ID NO: 1543, residues 22-485 of SEQ ID NO: 1549, residues 22-492 of SEQ ID NO: 1555, residues 22-492 of SEQ ID NO: 1561, residues 22-483 of SEQ ID NO: 1567, residues 22-490 of SEQ ID NO: 1573, residues 22-485 of SEQ ID NO: 1579, residues 22-486 of SEQ ID NO: 1585, residues 22-492 of SEQ ID NO: 1591, residues 22-488 of SEQ ID NO: 1597, residues 22-488 of SEQ ID NO: 1603, residues 22-495 of SEQ ID NO: 1609, residues 22-490 of SEQ ID NO: 1615, SEQ ID NO: 1620, SEQ ID NO: 1624, SEQ ID NO: 1628, or SEQ ID NO: 1632).

[0355] In one embodiment of the preceding methods, the CAR molecule comprises:
[0356] (i) an scFv;
[0357] (ii) a transmembrane domain that comprises a transmembrane domain of a protein selected from the group consisting of the alpha, beta or zeta chain of the T-cell receptor, CD28, CD3 epsilon, CD45, CD4, CD5, CD8, CD9, CD16, CD22, CD33, CD37, CD64, CD80, CD86, CD134, CD137 and CD154;
[0358] (iii) a hinge region comprising SEQ ID NO:14, or a sequence with 95-99% identity thereof;
[0359] (iv) a costimulatory domain that is a functional signaling domain obtained from a protein selected from the group consisting of OX40, CD2, CD27, CD28, CDS, ICAM-1, LFA-1 (CD11a/CD18), ICOS (CD278), and 4-1BB (CD137), wherein optionally the costimulatory domain comprises the amino acid sequence of SEQ ID NO:16 or 51;
[0360] (v) an intracellular signaling domain comprising a functional signaling domain of 4-1BB and/or a functional signaling domain of CD3 zeta; e.g., an intracellular signaling domain comprising the sequence of SEQ ID NO: 16 and/or the sequence of SEQ ID NO:17 or 43; or
[0361] (vi) a leader sequence, optionally wherein the leader sequence comprises the amino acid sequence of SEQ ID NO: 13.

[0362] In one embodiment, the BCMA CAR-expressing cell comprises a nucleic acid encoding a CAR molecule, wherein the CAR molecule comprises an anti-BCMA binding domain, a transmembrane domain, and an intracellular signaling domain.

[0363] In one embodiment, the encoded anti-BCMA binding domain comprises:
[0364] a heavy chain variable region (VH) comprising a heavy chain complementarity determining region 1 (VHCDR1), a VHCDR2, and a VHCDR3 of any anti-BCMA heavy chain binding domain amino acid sequence listed in Tables 4D, 4E, 4G, 4I, and 4F (or a sequence at least about 85%, 90%, 95%, 99% or more identical thereto, and/or having one, two, three or more substitutions, insertions or deletions, e.g., conserved substitutions), and/or
[0365] a light chain variable region (VL) comprising a light chain complementarity determining region 1 (VLCDR1), a VLCDR2, and a VLCDR3 of any anti-BCMA light chain binding domain amino acid sequence listed in Tables 4D, 4E, 4H 4J, and 4F (or a sequence at least about 85%, 90%, 95%, 99% or more identical thereto, and/or having one, two, three or more substitutions, insertions or deletions, e.g., conserved substitutions).

[0366] Additional heavy chain variable domain CDR sequences according to the Chothia numbering scheme are described in Table 22 on page 100 of WO/2016/014565, filed 21 Jul. 2015. Additional light chain variable domain CDR sequences according to the Chothia numbering scheme are described in Table 23 on pages 101-102 of WO/2016/014565, filed 21 Jul. 2015.

[0367] In one embodiment, the encoded anti-BCMA binding domain comprises:
[0368] a VH comprising a VH of any anti-BCMA heavy chain binding domain amino acid sequence listed in Tables 4D, 4E, and 4F (or a sequence at least about 85%, 90%, 95%, 99% or more identical thereto, and/or having one, two, three or more substitutions, insertions or deletions, e.g., conserved substitutions), and/or
[0369] a VL comprising a VL of any anti-BCMA light chain binding domain amino acid sequence listed in Tables 4D, 4E, and 4F (or a sequence at least about 85%, 90%, 95%, 99% or more identical thereto, and/or having one, two, three or more substitutions, insertions or deletions, e.g., conserved substitutions).

[0370] In one embodiment, the encoded anti-BCMA binding domain comprises an scFv comprising an scFv amino acid sequence listed in Tables 4D and 4E (or a sequence at least about 85%, 90%, 95%, 99% or more identical thereto, and/or having one, two, three or more substitutions, insertions or deletions, e.g., conserved substitutions).

[0371] In one embodiment, the encoded anti-BCMA binding domain comprises an scFv comprising a VH, a VL, and a linker, wherein the linker comprises the amino acid sequence of GGGGSGGGGSGGGGSGGGGS (SEQ ID NO: 3200).

[0372] In one embodiment, the encoded anti-BCMA binding domain comprises an amino acid sequence selected from the group consisting of SEQ ID NOs: 1400, 1406, 1412, 1418, 1424, 1430, 1436, 1442, 1448, 1454, 1460, 1466, 1472, 1478, 1485, 1491, 1497, 1503, 1509, 1515, 1521, 1527, 1533, 1539, 1545, 1551, 1557, 1563, 1569, 1575, 1581, 1587, 1593, 1599, 1605, 1611, 1619, 1623, 1627, or 1631 or a sequence with at least 95%, e.g., 95-99%, identity thereof.

[0373] In one embodiment, the nucleic acid encoding the anti-BCMA binding domain comprises a nucleotide sequence selected from the group consisting of SEQ ID NO: 1407, SEQ ID NO: 1413, SEQ ID NO: 1419, SEQ ID NO: 1425, SEQ ID NO: 1431, SEQ ID NO: 1437, SEQ ID NO: 1443., SEQ ID NO: 1449, SEQ ID NO: 1455, SEQ ID NO: 1461, SEQ ID NO: 1401, SEQ ID NO: 1467, SEQ ID NO: 1473, SEQ ID NO: 1480, SEQ ID NO: 1486, SEQ ID NO: 1492, SEQ ID NO: 1498, SEQ ID NO: 1504, SEQ ID NO: 1510, SEQ ID NO: 1516, SEQ ID NO: 1522, SEQ ID NO: 1528, SEQ ID NO: 1534, SEQ ID NO: 1540, SEQ ID NO: 1546, SEQ ID NO: 1552, SEQ ID NO: 1558, SEQ ID NO: 1564, SEQ ID NO: 1570, SEQ ID NO: 1576, SEQ ID NO: 1582, SEQ ID NO: 1588, SEQ ID NO: 1594, SEQ ID NO: 1600, SEQ ID NO: 1606, SEQ ID NO: 1612, or a sequence with at least 95%, e.g., 95-99%, identity thereof.

[0374] In one embodiment, the encoded CAR molecule comprises a full CAR amino acid sequence listed in Tables 4D and 4E (or a sequence at least about 85%, 90%, 95%, 99% or more identical thereto, and/or having one, two, three or more substitutions, insertions or deletions, e.g., conserved substitutions).

[0375] In one embodiment, the encoded CAR molecule comprises an amino acid sequence selected from the group consisting of residues 22-483 of SEQ ID NO: 1404, residues 22-490 of SEQ ID NO: 1410, residues 22-488 of SEQ ID NO: 1416, residues 22-487 of SEQ ID NO: 1422, residues 22-493 of SEQ ID NO: 1428, residues 22-490 of SEQ ID NO: 1434, residues 22-491 of SEQ ID NO: 1440, residues 22-482 of SEQ ID NO: 1446, residues 22-483 of SEQ ID NO: 1452, residues 22-485 of SEQ ID NO: 1458, residues 22-483 of SEQ ID NO: 1464, residues 22-490 of SEQ ID NO: 1470, residues 22-483 of SEQ ID NO: 1476, residues 22-484 of SEQ ID NO: 1483, residues 22-485 of SEQ ID NO: 1489, residues 22-487 of SEQ ID NO: 1495, residues 23-489 of SEQ ID NO: 1501, residues 22-490 of SEQ ID NO: 1507, residues 22-484 of SEQ ID NO: 1513, residues 22-485 of SEQ ID NO: 1519, residues 22-489 of SEQ ID NO: 1525, residues 22-497 of SEQ ID NO: 1531, residues 22-492 of SEQ ID NO: 1537, residues 22-490 of SEQ ID NO: 1543, residues 22-485 of SEQ ID NO: 1549, residues 22-492 of SEQ ID NO: 1555, residues 22-492 of SEQ ID NO: 1561, residues 22-483 of SEQ ID NO: 1567, residues 22-490 of SEQ ID NO: 1573, residues 22-485 of SEQ ID NO: 1579, residues 22-486 of SEQ ID NO: 1585, residues 22-492 of SEQ ID NO: 1591, residues 22-488 of SEQ ID NO: 1597, residues 22-488 of SEQ ID NO: 1603, residues 22-495 of SEQ ID NO: 1609, residues 22-490 of SEQ ID NO: 1615, SEQ ID NO: 1620, SEQ ID NO: 1624, SEQ ID NO: 1628, or SEQ ID NO: 1632,or a sequence with at least 95%, e.g., 95-99%, identity thereof.

[0376] In one embodiment, the nucleic acid encoding the CAR molecule comprises a nucleotide sequence listed in Table 4D, or a sequence with at least 95%, e.g., 95-99%, identity thereof.

[0377] In one embodiment, the nucleic acid encoding the CAR molecule comprises a nucleotide sequence selected from the group consisting of SEQ ID NO: 1405, SEQ ID NO: 1411, SEQ ID NO: 1417, SEQ ID NO: 1423, SEQ ID NO: 1429, SEQ ID NO: 1435, SEQ ID NO: 1441, SEQ ID NO: 1447, SEQ ID NO: 1453, SEQ ID NO: 1459, SEQ ID NO: 1465, SEQ ID NO: 1471, SEQ ID NO: 1477, SEQ ID NO: 1484, SEQ ID NO: 1490, SEQ ID NO: 1496, SEQ ID NO: 1502, SEQ ID NO: 1508, SEQ ID NO: 1514, SEQ ID NO: 1520, SEQ ID NO: 1526, SEQ ID NO: 1532, SEQ ID NO: 1538, SEQ ID NO: 1544, SEQ ID NO: 1550, SEQ ID NO: 1556, SEQ ID NO: 1562, SEQ ID NO: 1568, SEQ ID NO: 1574, SEQ ID NO: 1580, SEQ ID NO: 1586, SEQ ID NO: 1592, SEQ ID NO: 1598, SEQ ID NO: 1604, SEQ ID NO: 1610, and SEQ ID NO: 1616, or a sequence with at least 95%, e.g., 95-99%, identity thereof.

[0378] In one embodiment, the encoded transmembrane domain comprises a transmembrane domain of a protein selected from the group consisting of the alpha, beta or zeta chain of a T-cell receptor, CD28, CD3 epsilon, CD45, CD4, CD5, CD8, CD9, CD16, CD22, CD33, CD37, CD64, CD80, CD86, CD134, CD137 and CD154.

[0379] In one embodiment, the encoded transmembrane domain comprises the amino acid sequence of SEQ ID NO: 15 (or a sequence at least about 85%, 90%, 95%, 99% or more identical thereto, and/or having one, two, three or more substitutions, insertions or deletions, e.g., conserved substitutions).

[0380] In one embodiment, the nucleic acid encoding the CAR molecule comprises the nucleotide sequence of SEQ ID NO: 56, or a sequence with 95-99% identity thereof.

[0381] In one embodiment, the encoded anti-BCMA binding domain is connected to the transmembrane domain by a hinge region.

[0382] In one embodiment, the encoded hinge region comprises the amino acid sequence of SEQ ID NO: 14 or 102 (or a sequence at least about 85%, 90%, 95%, 99% or more identical thereto, and/or having one, two, three or more substitutions, insertions or deletions, e.g., conserved substitutions).

[0383] In one embodiment, the nucleic acid encoding the CAR molecule comprises the nucleotide sequence of SEQ ID NO: 55 or 103, or a sequence with 95-99% identity thereof.

[0384] In one embodiment, the encoded intracellular signaling domain is a functional signaling domain obtained from a protein chosen from an MHC class I molecule, a TNF receptor, an immunoglobulin-like protein, a cytokine receptor, integrin, signaling lymphocytic activation molecule (SLAM), an activating NK cell receptor, BTLA, a Toll ligand receptor, CD3, OX40, CD2, CD7, CD27, CD28, CD30, CD40, CDS, ICAM-1, LFA-1 (CD11a/CD18), 4-1BB (CD137), B7-H3, CDS, ICAM-1, ICOS (CD278), GITR, BAFFR, LIGHT, HVEM (LIGHTR), KIRDS2, SLAMF7, NKp80 (KLRF1), NKp44, NKp30, NKp46, CD19, CD4, CD8alpha, CD8beta, IL2R beta, IL2R gamma, IL7R alpha, ITGA4, VLA1, CD49a, ITGA4, IA4, CD49D, ITGA6, VLA-6, CD49f, ITGAD, CD11d, ITGAE, CD103, ITGAL, CD11a, LFA-1, ITGAM, CD11b, ITGAX, CD11c, ITGB1, CD29, ITGB2, CD18, LFA-1, ITGB7, NKG2D, NKG2C, TNFR2, TRANCE/RANKL, DNAM1 (CD226), SLAMF4 (CD244, 2B4), CD84, CD96 (Tactile), CEACAM1, CRTAM, Ly9 (CD229), CD160 (BY55), PSGL1, CD100 (SEMA4D), CD69, SLAMF6 (NTB-A, Ly108), SLAM (SLAMF1, CD150, IPO-3), BLAME (SLAMF8), SELPLG (CD162), LTBR, LAT, GADS, SLP-76, PAG/Cbp, CD19a, or a ligand that specifically binds with CD83.

[0385] In one embodiment, the encoded intracellular signaling domain is a functional signaling domain of a protein chosen from 4-1BB, CD3 zeta, CD28, or ICOS.

[0386] In one embodiment, the encoded intracellular signaling domain comprises the amino acid sequence of SEQ ID NO: 16, 17, 43, 1317, or 1319 (or a sequence at least about 85%, 90%, 95%, 99% or more identical thereto, and/or having one, two, three or more substitutions, insertions or deletions, e.g., conserved substitutions).

[0387] In one embodiment, the nucleic acid molecule encoding the CAR molecule comprises the nucleotide sequence of SEQ ID NO: 60, 101, 44, 1318, or 1320, or a sequence with 95-99% identity thereof.

[0388] In one embodiment, the nucleic acid encoding the CAR molecule comprises:
[0389] (i) a leader sequence encoding the amino acid sequence of SEQ ID NO: 13 (or a sequence at least about 85%, 90%, 95%, 99% or more identical thereto, and/or having one, two, three or more substitutions, insertions or deletions, e.g., conserved substitutions); or
[0390] (ii) the nucleotide sequence of SEQ ID NO: 54, or a sequence with 95-99% identity thereof.

[0391] In one embodiment, the nucleic acid encoding the CAR molecule is a DNA molecule, optionally wherein the DNA molecule is transcribed under an EF-1 promoter comprising the sequence of SEQ ID NO: 100.

[0392] In one embodiment, the cell is an autologous cell or an allogeneic cell.

[0393] In one embodiment, the cell is a T cell or a natural killer (NK) cell.

[0394] In some embodiments, the BCMA inhibitor, e.g., the BCMA CAR, can be used to treat a hematological malignancy. In embodiments, the BCMA inhibitor, e.g., the BCMA CAR, can be used to treat a disease associated with BCMA expression.

[0395] In one embodiment, the disease associated with expression of BCMA is:
[0396] (i) a cancer or malignancy, or a precancerous condition chosen from one or more of a myelodysplasia, a myelodysplastic syndrome or a preleukemia, or
[0397] (ii) a non-cancer related indication associated with expression of BCMA.

[0398] In one embodiment, the disease is chosen from acute leukemia, B-cell acute lymphoblastic leukemia (BALL), T-cell acute lymphoblastic leukemia (TALL), acute lymphoblastic leukemia (ALL), chronic myelogenous leukemia (CML), chronic lymphocytic leukemia (CLL), B cell prolymphocytic leukemia, blastic plasmacytoid dendritic cell neoplasm, Burkitt's lymphoma, diffuse large B cell lymphoma, follicular lymphoma, hairy cell leukemia, small cell- or large cell-follicular lymphoma, a malignant lymphoproliferative condition, mucosa associated lymphoid tissue (MALT) lymphoma, mantle cell lymphoma, marginal zone lymphoma, multiple myeloma, myelodysplasia and myelodysplastic syndrome, non-Hodgkin's lymphoma, plasmablastic lymphoma, plasmacytoid dendritic cell neoplasm, Waldenstrom macroglobulinemia, a plasma cell proliferative disorder (e.g., asymptomatic myeloma (smoldering multiple myeloma or indolent myeloma), monoclonal gammapathy of undetermined significance (MGUS), Waldenstrom's macroglobulinemia, plasmacytomas (e.g., plasma cell dyscrasia, solitary myeloma, solitary plasmacytoma, extramedullary plasmacytoma, and multiple plasmacytoma), systemic amyloid light chain amyloidosis, and POEMS syndrome (also known as Crow-Fukase syndrome, Takatsuki disease, and PEP syndrome)), prostate cancer (e.g., castrate-resistant or therapy-resistant prostate cancer, or metastatic prostate cancer), pancreatic cancer, or lung cancer.

[0399] In one embodiment, the disease is a hematologic cancer. In one embodiment, the disease is multiple myeloma. In one embodiment, the disease is CD19-negative multiple myeloma.

[0400] In embodiments, the compositions disclosed herein (e.g., nucleic acids, vectors, or cells) are for use as a medicament.

[0401] In embodiments, the compositions disclosed herein are used in the treatment of a hematological cancer.

[0402] In embodiments, the compositions disclosed herein are used in the treatment of a disease associated with expression of a B-cell antigen (e.g., CD19), e.g., a B-cell leukemia or lymphoma (e.g., a CD19-associated disease).

[0403] In other embodiments, the compositions disclosed herein are used in the treatment of a disease associated with expression of a BCMA antigen (e.g., CD19), e.g., a BCMA-associated disease.

[0404] Unless otherwise defined, all technical and scientific terms used herein have the same meaning as commonly understood by one of ordinary skill in the art to which this invention belongs. Although methods and materials similar or equivalent to those described herein can be used in the practice or testing of the present invention, suitable methods and materials are described below. All publications, patent applications, patents, and other references mentioned herein (e.g., sequence database reference numbers) are incorporated by reference in their entirety. For example, all GenBank™, Unigene, and Entrez sequences referred to herein, e.g., in any Table herein, are incorporated by reference. Unless otherwise specified, the sequence accession numbers specified herein, including in any Table herein, refer to the database entries current as of Apr. 8, 2015. When one gene or protein references a plurality of sequence accession numbers, all of the sequence variants are encompassed.

[0405] In addition, the materials, methods, and examples are illustrative only and not intended to be limiting.

[0406] Headings, sub-headings or numbered or lettered elements, e.g., (a), (b), (i) etc, are presented merely for ease of reading. The use of headings or numbered or lettered elements in this document does not require the steps or elements be performed in alphabetical order or that the steps or elements are necessarily discrete from one another.

[0407] Other features, objects, and advantages of the invention will be apparent from the description and drawings, and from the claims.

### BRIEF DESCRIPTION OF THE DRAWINGS

[0408] FIGS. 1A and 1B are Kaplan-Meier plots showing overall survival (FIG. 76A) and relapse-free survival (FIG. 76B) of ALL patients treated with CTL019.

[0409] FIG. 2 is a time course depicting serum IL-6 levels, CSF IL-6 levels, patient temperature, and CART-BCMA frequency in a patient experiencing CRS.

[0410] FIG. 3 shows levels of sBCMA, BAFF and APRIL in longitudinal serum samples from 6 UPCC14415 patients after CAR-BCMA infusion.

[0411] FIG. 4 shows levels of serum sBCMA (right Y axis, squares) correlated with CAR-BCMA marking (left Y axis, circles) in peripheral blood DNA from 6 UPCC14415 patients over time after CAR-BCMA infusion.

[0412] FIGS. 5A-5C show sBCMA levels in patient samples. FIG. 5A shows levels of serum sBCMA (right Y axis, squares) correlated with CAR-19 marking (left Y axis, circles) in peripheral blood DNA from 6 UPCC02413 patients over time after CAR-19 infusion. Dotted line is sBCMA in normal donor sera (see FIG. 81). FIG. 5B shows levels of serum sBCMA (right Y axis, squares) correlated with CAR-19 marking (left Y axis, circles) in peripheral blood DNA from 4 UPCC02413 patients over time after CAR-19 infusion. FIG. 5C shows levels of serum sBCMA (right Y axis, squares) correlated with CAR-19 marking (left Y axis, circles) in peripheral blood DNA from a UPCC019413 patient (single-patient compassionate-use protocol) over time after CAR-19 infusion.

[0413] FIG. 6 shows Sox2 antibody levels in patients treated with CTL019. Left panel shows anti-sox2 antibodies in patients 1, 2, 5, 7, 8, 9, 10, and 12. The right panel shows patient 1 samples tested using 1:400, 1:800, or 1:1200 dilutions.

[0414] FIG. 7 is a set of graphs showing peak expansion, persistence, and in vitro proliferation in the indicated patient populations, and proliferation in vitro vs in vivo expansion.

[0415] FIG. 8 is a set of graphs showing levels of STAT3 signaling mediators and targets in the indicated patient populations.

[0416] FIG. 9 shows the response of relapsed refractory Acute Lymphocytic Leukemia (ALL) pediatric patients with CNS involvement to CTL019 therapy.

[0417] FIGS. 10A-10B show the absolute count (FIG. 10A) and percentages of lymphocytes (FIG. 10B) in the peripheral blood from NHL patients whose cells were used for CAR T manufacturing.

[0418] FIGS. 11A-11C show the CD45, lymphocyte and monocyte profiles in apheresis samples from for each patient grouped by success or failure of CAR T manufacturing. CD3+CD45+ FACS staining data is shown in FIG. 11A. FIG. 11B shows percent lymphocytes, as determined by a multisizer and FIG. 11C shows percent monocytes in the samples, as determined by a multisizer.

[0419] FIGS. 12A-12D show growth curves of fresh vs. thawed cells from samples that failed the first CAR T manufacturing attempt.

[0420] FIGS. 13A-13B show CD45 vs. CD3 flow cytometry dot plots of fresh and thawed cells from two patient samples. FIG. 13A shows data from sample 41 and FIG. 13B shows data from sample 26.

[0421] FIGS. 14A-14B show CD15 vs. CD14 (top panels) and CXCR2 vs. CD14 (bottom panels) flow cytometry dot plots of fresh and thawed cells from two patient samples. FIG. 14A shows data from sample 54 and FIG. 14B shows data from sample 58.

[0422] FIGS. 15A-15B show dose response logistic regression analyses for patients treated with autologous CTL019.

### DETAILED DESCRIPTION

### Definitions

[0423] Unless defined otherwise, all technical and scientific terms used herein have the same meaning as commonly understood by one of ordinary skill in the art to which the invention pertains.

[0424] The term “a” and “an” refers to one or to more than one (i.e., to at least one) of the grammatical object of the article. By way of example, “an element” means one element or more than one element.

[0425] The term “about” when referring to a measurable value such as an amount, a temporal duration, and the like, is meant to encompass variations of ±20% or in some instances ±10%, or in some instances ±5%, or in some instances ±1%, or in some instances ±0.1% from the specified value, as such variations are appropriate to perform the disclosed methods.

[0426] The term “apheresis” as used herein refers to the art-recognized extracorporeal process by which the blood of a donor or patient is removed from the donor or patient and passed through an apparatus that separates out selected particular constituent(s) and returns the remainder to the circulation of the donor or patient, e.g., by retransfusion. Thus, “an apheresis sample” refers to a sample obtained using apheresis.

[0427] The term “bioequivalent” refers to an amount of an agent other than the reference compound (e.g., RAD001), required to produce an effect equivalent to the effect produced by the reference dose or reference amount of the reference compound (e.g., RAD001). In an embodiment the effect is the level of mTOR inhibition, e.g., as measured by P70 S6 kinase inhibition, e.g., as evaluated in an in vivo or in vitro assay, e.g., as measured by an assay described herein, e.g., the Boulay assay, or measurement of phosphorylated S6 levels by western blot. In an embodiment, the effect is alteration of the ratio of PD-1 positive/PD-1 negative T cells, as measured by cell sorting. In an embodiment a bioequivalent amount or dose of an mTOR inhibitor is the amount or dose that achieves the same level of P70 S6 kinase inhibition as does the reference dose or reference amount of a reference compound. In an embodiment, a bioequivalent amount or dose of an mTOR inhibitor is the amount or dose that achieves the same level of alteration in the ratio of PD-1 positive/PD-1 negative T cells as does the reference dose or reference amount of a reference compound.

[0428] The term “inhibition” or “inhibitor” includes a reduction in a certain parameter, e.g., an activity, of a given molecule, e.g., CD20, CD19, or BCMA. For example, inhibition of an activity, e.g., an activity of CD19, of at least 5%, 10%, 20%, 30%, 40%, or more is included by this term. Thus, inhibition need not be 100%. Activities for the inhibitors can be determined as described herein or by assays known in the art. A “B-cell inhibitor” is a molecule, e.g., a small molecule, antibody, CAR or cell comprising a CAR, which causes the reduction in a certain parameter, e.g., an activity, e.g., growth or proliferation, of a B-cell, or which causes a reduction in a certain parameter, e.g., an activity, of a molecule associated with a B cell. Non-limiting examples of molecules associated with a B cell include proteins expressed on the surface of B cells, e.g., CD19, CD20, CD10, CD22, CD34, CD123, FLT-3, ROR1, CD79b, CD179b, CD79a, or BCMA.

[0429] The term “Chimeric Antigen Receptor” or alternatively a “CAR” refers to a set of polypeptides, typically two in the simplest embodiments, which when in an immune effector cell, provides the cell with specificity for a target cell, typically a cancer cell, and with intracellular signal generation. In some embodiments, a CAR comprises at least an extracellular antigen binding domain, a transmembrane domain and a cytoplasmic signaling domain (also referred to herein as “an intracellular signaling domain”) comprising a functional signaling domain derived from a stimulatory molecule and/or costimulatory molecule as defined below. In some embodiments, the set of polypeptides are in the same polypeptide chain, e.g., comprise a chimeric fusion protein. In some embodiments, the set of polypeptides are not contiguous with each other, e.g., are in different polypeptide chains. In some embodiments, the set of polypeptides include a dimerization switch that, upon the presence of a dimerization molecule, can couple the polypeptides to one another, e.g., can couple an antigen binding domain to an intracellular signaling domain. In one aspect, the stimulatory molecule of the CAR is the zeta chain associated with the T cell receptor complex (e.g., CD3 zeta). In one aspect, the cytoplasmic signaling domain comprises a primary signaling domain (e.g., a primary signaling domain of CD3-zeta).

[0430] In one aspect, the cytoplasmic signaling domain further comprises one or more functional signaling domains derived from at least one costimulatory molecule as defined below. In one aspect, the costimulatory molecule is chosen from the costimulatory molecules described herein, e.g., 4-1BB (i.e., CD137), CD27, and/or CD28. In one aspect, the CAR comprises a chimeric fusion protein comprising an extracellular antigen binding domain, a transmembrane domain and an intracellular signaling domain comprising a functional signaling domain derived from a stimulatory molecule. In one aspect, the CAR comprises a chimeric fusion protein comprising an extracellular antigen binding domain, a transmembrane domain and an intracellular signaling domain comprising a functional signaling domain derived from a costimulatory molecule and a functional signaling domain derived from a stimulatory molecule. In one aspect, the CAR comprises a chimeric fusion protein comprising an extracellular antigen binding domain, a transmembrane domain and an intracellular signaling domain comprising two functional signaling domains derived from one or more costimulatory molecule(s) and a functional signaling domain derived from a stimulatory molecule. In one aspect, the CAR comprises a chimeric fusion protein comprising an extracellular antigen binding domain, a transmembrane domain and an intracellular signaling domain comprising at least two functional signaling domains derived from one or more costimulatory molecule(s) and a functional signaling domain derived from a stimulatory molecule. In one aspect the CAR comprises an optional leader sequence at the amino-terminus (N-ter) of the CAR fusion protein. In one aspect, the CAR further comprises a leader sequence at the N-terminus of the extracellular antigen binding domain, wherein the leader sequence is optionally cleaved from the antigen binding domain (e.g., a scFv) during cellular processing and localization of the CAR to the cellular membrane.

[0431] As used herein, unless otherwise specified, the terms “prevent,” “preventing” and “prevention” refer to an action that occurs before the subject begins to suffer from the condition, or relapse of the condition. Prevention need not result in a complete prevention of the condition; partial prevention or reduction of the condition or a symptom of the condition, or reduction of the risk of developing the condition, is encompassed by this term.

[0432] Administered “in combination”, as used herein, means that two (or more) different treatments are delivered to the subject during the course of the subject's affliction with the disorder, e.g., the two or more treatments are delivered after the subject has been diagnosed with the disorder and before the disorder has been cured or eliminated or treatment has ceased for other reasons. In some embodiments, the delivery of one treatment is still occurring when the delivery of the second begins, so that there is overlap in terms of administration. This is sometimes referred to herein as “simultaneous” or “concurrent delivery”. In other embodiments, the delivery of one treatment ends before the delivery of the other treatment begins. In some embodiments of either case, the treatment is more effective because of combined administration. For example, the second treatment is more effective, e.g., an equivalent effect is seen with less of the second treatment, or the second treatment reduces symptoms to a greater extent, than would be seen if the second treatment were administered in the absence of the first treatment, or the analogous situation is seen with the first treatment. In some embodiments, delivery is such that the reduction in a symptom, or other parameter related to the disorder is greater than what would be observed with one treatment delivered in the absence of the other. The effect of the two treatments can be partially additive, wholly additive, or greater than additive. The delivery can be such that an effect of the first treatment delivered is still detectable when the second is delivered. In one embodiment, the CAR-expressing cell is administered at a dose and/or dosing schedule described herein, and the B-cell inhibitor, or agent that enhances the activity of the CD19 CAR-expressing cell is administered at a dose and/or dosing schedule described herein.

[0433] “Derived from” as that term is used herein, indicates a relationship between a first and a second molecule. It generally refers to structural similarity between the first molecule and a second molecule and does not connote or include a process or source limitation on a first molecule that is derived from a second molecule. For example, in the case of an intracellular signaling domain that is derived from a CD3zeta molecule, the intracellular signaling domain retains sufficient CD3zeta structure such that is has the required function, namely, the ability to generate a signal under the appropriate conditions. It does not connote or include a limitation to a particular process of producing the intracellular signaling domain, e.g., it does not mean that, to provide the intracellular signaling domain, one must start with a CD3zeta sequence and delete unwanted sequence, or impose mutations, to arrive at the intracellular signaling domain.

[0434] The term “signaling domain” refers to the functional portion of a protein which acts by transmitting information within the cell to regulate cellular activity via defined signaling pathways by generating second messengers or functioning as effectors by responding to such messengers.

[0435] As used herein, the term “BCMA” refers to B-cell maturation antigen. BCMA (also known as TNFRSF17, BCM or CD269) is a member of the tumor necrosis receptor (TNFR) family and is predominantly expressed on terminally differentiated B cells, e.g., memory B cells and plasma cells. Its ligands include B-cell activating factor (BAFF) and a proliferation-inducing ligand (APRIL). The protein BCMA is encoded by the gene TNFRSF17. Exemplary BCMA sequences are available at the Uniprot database under accession number Q02223.

[0436] As used herein, the term “CD19” refers to the Cluster of Differentiation 19 protein, which is an antigenic determinant detectable on leukemia precursor cells. The human and murine amino acid and nucleic acid sequences can be found in a public database, such as GenBank™, UniProt and Swiss-Prot. For example, the amino acid sequence of human CD19 can be found as UniProt/Swiss-Prot Accession No. P15391 and the nucleotide sequence encoding of the human CD19 can be found at Accession No. NM_001178098. As used herein, “CD19” includes proteins comprising mutations, e.g., point mutations, fragments, insertions, deletions and splice variants of full length wild-type CD19. CD19 is expressed on most B lineage cancers, including, e.g., acute lymphoblastic leukemia, chronic lymphocyte leukemia and non-Hodgkin lymphoma. Other cells with express CD19 are provided below in the definition of “disease associated with expression of CD19.” It is also an early marker of B cell progenitors. See, e.g., Nicholson et al. Mol. Immun. 34 (16-17): 1157-1165 (1997). In one aspect the antigen-binding portion of the CART recognizes and binds an antigen within the extracellular domain of the CD19 protein. In one aspect, the CD19 protein is expressed on a cancer cell.

[0437] The term “antibody,” as used herein, refers to a protein, or polypeptide sequence derived from an immunoglobulin molecule which specifically binds with an antigen. Antibodies can be polyclonal or monoclonal, multiple or single chain, or intact immunoglobulins, and may be derived from natural sources or from recombinant sources. Antibodies can be tetramers of immunoglobulin molecules.

[0438] The term “antibody fragment” refers to at least one portion of an antibody, that retains the ability to specifically interact with (e.g., by binding, steric hindrance, stabilizing/destabilizing, spatial distribution) an epitope of an antigen. Examples of antibody fragments include, but are not limited to, Fab, Fab′, F(ab′)₂, Fv fragments, scFv antibody fragments, disulfide-linked Fvs (sdFv), a Fd fragment consisting of the VH and CH1 domains, linear antibodies, single domain antibodies such as sdAb (either VL or VH), camelid VHH domains, multi-specific antibodies formed from antibody fragments such as a bivalent fragment comprising two Fab fragments linked by a disulfide bridge at the hinge region, and an isolated CDR or other epitope binding fragments of an antibody. An antigen binding fragment can also be incorporated into single domain antibodies, maxibodies, minibodies, nanobodies, intrabodies, diabodies, triabodies, tetrabodies, v-NAR and bis-scFv (see, e.g., Hollinger and Hudson, Nature Biotechnology 23:1126-1136, 2005). Antigen binding fragments can also be grafted into scaffolds based on polypeptides such as a fibronectin type III (Fn3)(see U.S. Pat. No. 6,703,199, which describes fibronectin polypeptide minibodies).

[0439] The term “scFv” refers to a fusion protein comprising at least one antibody fragment comprising a variable region of a light chain and at least one antibody fragment comprising a variable region of a heavy chain, wherein the light and heavy chain variable regions are contiguously linked, e.g., via a synthetic linker, e.g., a short flexible polypeptide linker, and capable of being expressed as a single chain polypeptide, and wherein the scFv retains the specificity of the intact antibody from which it is derived. Unless specified, as used herein an scFv may have the VL and VH variable regions in either order, e.g., with respect to the N-terminal and C-terminal ends of the polypeptide, the scFv may comprise VL-linker-VH or may comprise VH-linker-VL.

[0440] The term “complementarity determining region” or “CDR,” as used herein, refers to the sequences of amino acids within antibody variable regions which confer antigen specificity and binding affinity. For example, in general, there are three CDRs in each heavy chain variable region (e.g., HCDR1, HCDR2, and HCDR3) and three CDRs in each light chain variable region (LCDR1, LCDR2, and LCDR3). The precise amino acid sequence boundaries of a given CDR can be determined using any of a number of well-known schemes, including those described by Kabat et al. (1991), “Sequences of Proteins of Immunological Interest,” 5th Ed. Public Health Service, National Institutes of Health, Bethesda, MD (“Kabat” numbering scheme), Al-Lazikani et al., (1997) JMB 273,927-948 (“Chothia” numbering scheme), or a combination thereof. Under the Kabat numbering scheme, in some embodiments, the CDR amino acid residues in the heavy chain variable domain (VH) are numbered 31-35 (HCDR1), 50-65 (HCDR2), and 95-102 (HCDR3); and the CDR amino acid residues in the light chain variable domain (VL) are numbered 24-34 (LCDR1), 50-56 (LCDR2), and 89-97 (LCDR3). Under the Chothia numbering scheme, in some embodiments, the CDR amino acids in the VH are numbered 26-32 (HCDR1), 52-56 (HCDR2), and 95-102 (HCDR3); and the CDR amino acid residues in the VL are numbered 26-32 (LCDR1), 50-52 (LCDR2), and 91-96 (LCDR3). In a combined Kabat and Chothia numbering scheme, in some embodiments, the CDRs correspond to the amino acid residues that are part of a Kabat CDR, a Chothia CDR, or both. For instance, in some embodiments, the CDRs correspond to amino acid residues 26-35 (HCDR1), 50-65 (HCDR2), and 95-102 (HCDR3) in a VH, e.g., a mammalian VH, e.g., a human VH; and amino acid residues 24-34 (LCDR1), 50-56 (LCDR2), and 89-97 (LCDR3) in a VL, e.g., a mammalian VL, e.g., a human VL.

[0441] As used herein, the term “binding domain” or “antibody molecule” refers to a protein, e.g., an immunoglobulin chain or fragment thereof, comprising at least one immunoglobulin variable domain sequence. The term “binding domain” or “antibody molecule” encompasses antibodies and antibody fragments. In an embodiment, an antibody molecule is a multispecific antibody molecule, e.g., it comprises a plurality of immunoglobulin variable domain sequences, wherein a first immunoglobulin variable domain sequence of the plurality has binding specificity for a first epitope and a second immunoglobulin variable domain sequence of the plurality has binding specificity for a second epitope. In an embodiment, a multispecific antibody molecule is a bispecific antibody molecule. A bispecific antibody has specificity for no more than two antigens. A bispecific antibody molecule is characterized by a first immunoglobulin variable domain sequence which has binding specificity for a first epitope and a second immunoglobulin variable domain sequence that has binding specificity for a second epitope.

[0442] The portion of the CAR of the invention comprising an antibody or antibody fragment thereof may exist in a variety of forms where the antigen binding domain is expressed as part of a contiguous polypeptide chain including, for example, a single domain antibody fragment (sdAb), a single chain antibody (scFv), a humanized antibody, or bispecific antibody (Harlow et al., 1999, In: Using Antibodies: A Laboratory Manual, Cold Spring Harbor Laboratory Press, NY; Harlow et al., 1989, In: Antibodies: A Laboratory Manual, Cold Spring Harbor, New York; Houston et al., 1988, Proc. Natl. Acad. Sci. USA 85:5879-5883; Bird et al., 1988, Science 242:423-426). In one aspect, the antigen binding domain of a CAR composition of the invention comprises an antibody fragment. In a further aspect, the CAR comprises an antibody fragment that comprises a scFv.

[0443] The term “antibody heavy chain,” refers to the larger of the two types of polypeptide chains present in antibody molecules in their naturally occurring conformations, and which normally determines the class to which the antibody belongs.

[0444] The term “antibody light chain,” refers to the smaller of the two types of polypeptide chains present in antibody molecules in their naturally occurring conformations. Kappa (x) and lambda (λ) light chains refer to the two major antibody light chain isotypes.

[0445] The term “recombinant antibody” refers to an antibody which is generated using recombinant DNA technology, such as, for example, an antibody expressed by a bacteriophage or yeast expression system. The term should also be construed to mean an antibody which has been generated by the synthesis of a DNA molecule encoding the antibody and which DNA molecule expresses an antibody protein, or an amino acid sequence specifying the antibody, wherein the DNA or amino acid sequence has been obtained using recombinant DNA or amino acid sequence technology which is available and well known in the art.

[0446] The term “antigen” or “Ag” refers to a molecule that provokes an immune response. This immune response may involve either antibody production, or the activation of specific immunologically-competent cells, or both. The skilled artisan will understand that any macromolecule, including virtually all proteins or peptides, can serve as an antigen. Furthermore, antigens can be derived from recombinant or genomic DNA. A skilled artisan will understand that any DNA, which comprises a nucleotide sequences or a partial nucleotide sequence encoding a protein that elicits an immune response therefore encodes an “antigen” as that term is used herein. Furthermore, one skilled in the art will understand that an antigen need not be encoded solely by a full length nucleotide sequence of a gene. It is readily apparent that the present invention includes, but is not limited to, the use of partial nucleotide sequences of more than one gene and that these nucleotide sequences are arranged in various combinations to encode polypeptides that elicit the desired immune response. Moreover, a skilled artisan will understand that an antigen need not be encoded by a “gene” at all. It is readily apparent that an antigen can be generated synthesized or can be derived from a biological sample, or might be macromolecule besides a polypeptide. Such a biological sample can include, but is not limited to a tissue sample, a tumor sample, a cell or a fluid with other biological components.

[0447] The terms “compete” or “cross-compete” are used interchangeably herein to refer to the ability of an antibody molecule to interfere with binding of an antibody molecule, e.g., an anti-CD19 or BCMA antibody molecule provided herein, to a target, e.g., human CD19 or BCMA. The interference with binding can be direct or indirect (e.g., through an allosteric modulation of the antibody molecule or the target). The extent to which an antibody molecule is able to interfere with the binding of another antibody molecule to the target, and therefore whether it can be said to compete, can be determined using a competition binding assay, e.g., as described herein. In some embodiments, a competition binding assay is a quantitative competition assay. In some embodiments, a first antibody molecule is said to compete for binding to the target with a second antibody molecule when the binding of the first antibody molecule to the target is reduced by 10% or more, e.g., 20% or more, 30% or more, 40% or more, 50% or more, 55% or more, 60% or more, 65% or more, 70% or more, 75% or more, 80% or more, 85% or more, 90% or more, 95% or more, 98% or more, 99% or more in a competition binding assay (e.g., a competition assay described herein).

[0448] As used herein, the term “epitope” refers to the moieties of an antigen (e.g., human CD19 or BCMA) that specifically interact with an antibody molecule. Such moieties, referred to herein as epitopic determinants, typically comprise, or are part of, elements such as amino acid side chains or sugar side chains. An epitopic determinate can be defined, e.g., by methods known in the art or disclosed herein, e.g., by crystallography or by hydrogen-deuterium exchange. At least one or some of the moieties on the antibody molecule, that specifically interact with an epitopic determinant, are typically located in a CDR(s). Typically an epitope has a specific three dimensional structural characteristics. Typically an epitope has specific charge characteristics. Some epitopes are linear epitopes while others are conformational epitopes.

[0449] The term “anti-cancer effect” refers to a biological effect which can be manifested by various means, including but not limited to, e.g., a decrease in tumor volume, a decrease in the number of cancer cells, a decrease in the number of metastases, an increase in life expectancy, decrease in cancer cell proliferation, decrease in cancer cell survival, or amelioration of various physiological symptoms associated with the cancerous condition. An “anti-cancer effect” can also be manifested by the ability of the peptides, polynucleotides, cells and antibodies described herein in prevention of the occurrence of cancer in the first place. The term “anti-tumor effect” refers to a biological effect which can be manifested by various means, including but not limited to, e.g., a decrease in tumor volume, a decrease in the number of tumor cells, a decrease in tumor cell proliferation, or a decrease in tumor cell survival.

[0450] The term “autologous” refers to any material derived from the same individual to whom it is later to be re-introduced into the individual.

[0451] The term “allogeneic” refers to any material derived from a different animal of the same species as the individual to whom the material is introduced. Two or more individuals are said to be allogeneic to one another when the genes at one or more loci are not identical. In some aspects, allogeneic material from individuals of the same species may be sufficiently unlike genetically to interact antigenically

[0452] The term “xenogeneic” refers to a graft derived from an animal of a different species.

[0453] The term “cancer” refers to a disease characterized by the uncontrolled growth of aberrant cells. Cancer cells can spread locally or through the bloodstream and lymphatic system to other parts of the body. Examples of various cancers are described herein and include but are not limited to, breast cancer, prostate cancer, ovarian cancer, cervical cancer, skin cancer, pancreatic cancer, colorectal cancer, renal cancer, liver cancer, brain cancer, lymphoma, leukemia, lung cancer and the like. The terms “tumor” and “cancer” are used interchangeably herein, e.g., both terms encompass solid and liquid, e.g., diffuse or circulating, tumors. As used herein, the term “cancer” or “tumor” includes premalignant, as well as malignant cancers and tumors.

[0454] The terms “cancer associated antigen” or “tumor antigen” or “proliferative disorder antigen” or “antigen associated with a proliferative disorder” interchangeably refers to a molecule (typically protein, carbohydrate or lipid) that is preferentially expressed on the surface of a cancer cell, either entirely or as a fragment (e.g., MHC/peptide), in comparison to a normal cell, and which is useful for the preferential targeting of a pharmacological agent to the cancer cell. In some embodiments, a tumor antigen is a marker expressed by both normal cells and cancer cells, e.g., a lineage marker, e.g., CD19 on B cells. In certain aspects, the tumor antigens of the present invention are derived from, cancers including but not limited to primary or metastatic melanoma, thymoma, lymphoma, sarcoma, lung cancer, liver cancer, non-Hodgkin lymphoma, Hodgkin lymphoma, leukemias, uterine cancer, cervical cancer, bladder cancer, kidney cancer and adenocarcinomas such as breast cancer, prostate cancer, ovarian cancer, pancreatic cancer, and the like. In some embodiments, the tumor antigen is an antigen that is common to a specific proliferative disorder. In some embodiments, a cancer-associated antigen is a cell surface molecule that is overexpressed in a cancer cell in comparison to a normal cell, for instance, 1-fold over expression, 2-fold overexpression, 3-fold overexpression or more in comparison to a normal cell. In some embodiments, a cancer-associated antigen is a cell surface molecule that is inappropriately synthesized in the cancer cell, for instance, a molecule that contains deletions, additions or mutations in comparison to the molecule expressed on a normal cell. In some embodiments, a cancer-associated antigen will be expressed exclusively on the cell surface of a cancer cell, entirely or as a fragment (e.g., MHC/peptide), and not synthesized or expressed on the surface of a normal cell. In some embodiments, the CARs of the present invention includes CARs comprising an antigen binding domain (e.g., antibody or antibody fragment) that binds to a MHC presented peptide. Normally, peptides derived from endogenous proteins fill the pockets of Major histocompatibility complex (MHC) class I molecules, and are recognized by T cell receptors (TCRs) on CD8+T lymphocytes. The MHC class I complexes are constitutively expressed by all nucleated cells. In cancer, virus-specific and/or tumor-specific peptide/MHC complexes represent a unique class of cell surface targets for immunotherapy. TCR-like antibodies targeting peptides derived from viral or tumor antigens in the context of human leukocyte antigen (HLA)-A1 or HLA-A2 have been described (see, e.g., Sastry et al., J Virol. 2011 85(5):1935-1942; Sergeeva et al., Bood, 2011 117(16):4262-4272; Verma et al., J Immunol 2010 184(4):2156-2165; Willemsen et al., Gene Ther 2001 8(21):1601-1608; Dao et al., Sci Transl Med 2013 5(176):176ra33; Tassev et al., Cancer Gene Ther 2012 19(2):84-100). For example, TCR-like antibody can be identified from screening a library, such as a human scFv phage displayed library.

[0455] The phrase “disease associated with expression of CD19” includes, but is not limited to, a disease associated with expression of CD19 (e.g., wild-type or mutant CD19) or condition associated with cells which express, or at any time expressed, CD19 (e.g., wild-type or mutant CD19) including, e.g., proliferative diseases such as a cancer or malignancy or a precancerous condition such as a myelodysplasia, a myelodysplastic syndrome or a preleukemia; or a noncancer related indication associated with cells which express CD19. For the avoidance of doubt, a disease associated with expression of CD19 may include a condition associated with cells which do not presently express CD19, e.g., because CD19 expression has been downregulated, e.g., due to treatment with a molecule targeting CD19, e.g., a CD19 CAR, but which at one time expressed CD19. In one aspect, a cancer associated with expression of CD19 is a hematological cancer. In one aspect, the hematological cancer is a leukemia or a lymphoma. In one aspect, a cancer associated with expression of CD19 includes cancers and malignancies including, but not limited to, e.g., one or more acute leukemias including but not limited to, e.g., B-cell acute lymphoblastic Leukemia (BALL), T-cell acute lymphoblastic Leukemia (TALL), acute lymphoblastic leukemia (ALL); one or more chronic leukemias including but not limited to, e.g., chronic myelogenous leukemia (CML), Chronic lymphocytic Leukemia (CLL). Additional cancers or hematologic conditions associated with expression of CD19 comprise, but are not limited to, e.g., B cell prolymphocytic leukemia, blastic plasmacytoid dendritic cell neoplasm, Burkitt's lymphoma, diffuse large B cell lymphoma, Follicular lymphoma, Hairy cell leukemia, small cell- or a large cell-follicular lymphoma, malignant lymphoproliferative conditions, MALT lymphoma, mantle cell lymphoma (MCL), Marginal zone lymphoma, multiple myeloma, myelodysplasia and myelodysplastic syndrome, non-Hodgkin lymphoma, Hodgkin lymphoma, plasmablastic lymphoma, plasmacytoid dendritic cell neoplasm, Waldenstrom macroglobulinemia, and “preleukemia” which are a diverse collection of hematological conditions united by ineffective production (or dysplasia) of myeloid blood cells, and the like. Further diseases associated with expression of CD19 expression include, but not limited to, e.g., atypical and/or non-classical cancers, malignancies, precancerous conditions or proliferative diseases associated with expression of CD19. Non-cancer related indications associated with expression of CD19 include, but are not limited to, e.g., autoimmune disease, (e.g., lupus), inflammatory disorders (allergy and asthma) and transplantation. In some embodiments, the CD19-expressing cells express, or at any time expressed, CD19 mRNA. In an embodiment, the CD19-expressing cells produce a CD19 protein (e.g., wild-type or mutant), and the CD19 protein may be present at normal levels or reduced levels. In an embodiment, the CD19-expressing cells produced detectable levels of a CD19 protein at one point, and subsequently produced substantially no detectable CD19 protein.

[0456] The phrase “disease associated with expression of BCMA” includes, but is not limited to, a disease associated with a cell which expresses BCMA (e.g., wild-type or mutant BCMA) or condition associated with a cell which expresses BCMA (e.g., wild-type or mutant BCMA) including, e.g., proliferative diseases such as a cancer or malignancy or a precancerous condition such as a myelodysplasia, a myelodysplastic syndrome or a preleukemia; or a noncancer related indication associated with a cell which expresses BCMA (e.g., wild-type or mutant BCMA). For the avoidance of doubt, a disease associated with expression of BCMA may include a condition associated with a cell which does not presently express BCMA, e.g., because BCMA expression has been downregulated, e.g., due to treatment with a molecule targeting BCMA, e.g., a BCMA inhibitor described herein, but which at one time expressed BCMA. In one aspect, a cancer associated with expression of BCMA (e.g., wild-type or mutant BCMA) is a hematological cancer. In one aspect, the hematological cancer is a leukemia or a lymphoma. In one aspect, a cancer associated with expression of BCMA (e.g., wild-type or mutant BCMA) is a malignancy of differentiated plasma B cells. In one aspect, a cancer associated with expression of BCMA(e.g., wild-type or mutant BCMA) includes cancers and malignancies including, but not limited to, e.g., one or more acute leukemias including but not limited to, e.g., B-cell acute lymphoblastic Leukemia (“BALL”), T-cell acute lymphoblastic Leukemia (“TALL”), acute lymphoblastic leukemia (ALL); one or more chronic leukemias including but not limited to, e.g., chronic myelogenous leukemia (CML), Chronic lymphocytic Leukemia (CLL). Additional cancers or hematologic conditions associated with expression of BMCA (e.g., wild-type or mutant BCMA) comprise, but are not limited to, e.g., B cell prolymphocytic leukemia, blastic plasmacytoid dendritic cell neoplasm, Burkitt's lymphoma, diffuse large B cell lymphoma, Follicular lymphoma, Hairy cell leukemia, small cell- or a large cell-follicular lymphoma, malignant lymphoproliferative conditions, MALT lymphoma, mantle cell lymphoma, Marginal zone lymphoma, multiple myeloma, myelodysplasia and myelodysplastic syndrome, non-Hodgkin's lymphoma, plasmablastic lymphoma, plasmacytoid dendritic cell neoplasm, Waldenstrom macroglobulinemia, and “preleukemia” which are a diverse collection of hematological conditions united by ineffective production (or dysplasia) of myeloid blood cells, and the like. In some embodiments, the cancer is multiple myeloma, Hodgkin's lymphoma, non-Hodgkin's lymphoma, or glioblastoma. In embodiments, a disease associated with expression of BCMA includes a plasma cell proliferative disorder, e.g., asymptomatic myeloma (smoldering multiple myeloma or indolent myeloma), monoclonal gammapathy of undetermined significance (MGUS), Waldenstrom's macroglobulinemia, plasmacytomas (e.g., plasma cell dyscrasia, solitary myeloma, solitary plasmacytoma, extramedullary plasmacytoma, and multiple plasmacytoma), systemic amyloid light chain amyloidosis, and POEMS syndrome (also known as Crow-Fukase syndrome, Takatsuki disease, and PEP syndrome). Further diseases associated with expression of BCMA (e.g., wild-type or mutant BCMA) expression include, but not limited to, e.g., atypical and/or non-classical cancers, malignancies, precancerous conditions or proliferative diseases associated with expression of BCMA (e.g., wild-type or mutant BCMA), e.g., a cancer described herein, e.g., a prostate cancer (e.g., castrate-resistant or therapy-resistant prostate cancer, or metastatic prostate cancer), pancreatic cancer, or lung cancer.

[0457] Non-cancer related conditions that are associated with BCMA (e.g., wild-type or mutant BCMA) include viral infections; e.g., HIV, fungal infections, e.g., C. neoformans; autoimmune disease; e.g. rheumatoid arthritis, system lupus erythematosus (SLE or lupus), pemphigus vulgaris, and Sjogren's syndrome; inflammatory bowel disease, ulcerative colitis; transplant-related allospecific immunity disorders related to mucosal immunity; and unwanted immune responses towards biologics (e.g., Factor VIII) where humoral immunity is important. In embodiments, a non-cancer related indication associated with expression of BCMA includes but is not limited to, e.g., autoimmune disease, (e.g., lupus), inflammatory disorders (allergy and asthma) and transplantation. In some embodiments, the tumor antigen-expressing cell expresses, or at any time expressed, mRNA encoding the tumor antigen. In an embodiment, the tumor antigen-expressing cell produces the tumor antigen protein (e.g., wild-type or mutant), and the tumor antigen protein may be present at normal levels or reduced levels. In an embodiment, the tumor antigen-expressing cell produced detectable levels of a tumor antigen protein at one point, and subsequently produced substantially no detectable tumor antigen protein.

[0458] The term “conservative sequence modifications” refers to amino acid modifications that do not significantly affect or alter the binding characteristics of the antibody or antibody fragment containing the amino acid sequence. Such conservative modifications include amino acid substitutions, additions and deletions. Modifications can be introduced into an antibody or antibody fragment of the invention by standard techniques known in the art, such as site-directed mutagenesis and PCR-mediated mutagenesis. Conservative amino acid substitutions are ones in which the amino acid residue is replaced with an amino acid residue having a similar side chain. Families of amino acid residues having similar side chains have been defined in the art. These families include amino acids with basic side chains (e.g., lysine, arginine, histidine), acidic side chains (e.g., aspartic acid, glutamic acid), uncharged polar side chains (e.g., glycine, asparagine, glutamine, serine, threonine, tyrosine, cysteine, tryptophan), nonpolar side chains (e.g., alanine, valine, leucine, isoleucine, proline, phenylalanine, methionine), beta-branched side chains (e.g., threonine, valine, isoleucine) and aromatic side chains (e.g., tyrosine, phenylalanine, tryptophan, histidine). Thus, one or more amino acid residues within a CAR of the invention can be replaced with other amino acid residues from the same side chain family and the altered CAR can be tested using the functional assays described herein.

[0459] The term “stimulation,” refers to a primary response induced by binding of a stimulatory molecule (e.g., a TCR/CD3 complex or CAR) with its cognate ligand (or tumor antigen in the case of a CAR) thereby mediating a signal transduction event, such as, but not limited to, signal transduction via the TCR/CD3 complex or signal transduction via the appropriate NK receptor or signaling domains of the CAR. Stimulation can mediate altered expression of certain molecules.

[0460] The term “stimulatory molecule,” refers to a molecule expressed by an immune cell, e.g., T cell, NK cell, or B cell) that provides the cytoplasmic signaling sequence(s) that regulate activation of the immune cell in a stimulatory way for at least some aspect of the immune cell signaling pathway. In one aspect, the signal is a primary signal that is initiated by, for instance, binding of a TCR/CD3 complex with an MHC molecule loaded with peptide, and which leads to mediation of a T cell response, including, but not limited to, proliferation, activation, differentiation, and the like. A primary cytoplasmic signaling sequence (also referred to as a “primary signaling domain”) that acts in a stimulatory manner may contain a signaling motif which is known as immunoreceptor tyrosine-based activation motif or ITAM. Examples of an ITAM containing cytoplasmic signaling sequence that is of particular use in the invention includes, but is not limited to, those derived from CD3 zeta, common FcR gamma (FCER1G), Fc gamma RIIa, FcR beta (Fc Epsilon Rib), CD3 gamma, CD3 delta, CD3 epsilon, CD79a, CD79b, DAP10, and DAP12. In a specific CAR of the invention, the intracellular signaling domain in any one or more CARS of the invention comprises an intracellular signaling sequence, e.g., a primary signaling sequence of CD3-zeta. In a specific CAR of the invention, the primary signaling sequence of CD3-zeta is the sequence provided as SEQ ID NO:17, or the equivalent residues from a non-human species, e.g., mouse, rodent, monkey, ape and the like. In a specific CAR of the invention, the primary signaling sequence of CD3-zeta is the sequence as provided in SEQ ID NO:43, or the equivalent residues from a non-human species, e.g., mouse, rodent, monkey, ape and the like.

[0461] The term “antigen presenting cell” or “APC” refers to an immune system cell such as an accessory cell (e.g., a B-cell, a dendritic cell, and the like) that displays a foreign antigen complexed with major histocompatibility complexes (MHC's) on its surface. T-cells may recognize these complexes using their T-cell receptors (TCRs). APCs process antigens and present them to T-cells.

[0462] “Immune effector cell,” as that term is used herein, refers to a cell that is involved in an immune response, e.g., in the promotion of an immune effector response. Examples of immune effector cells include T cells, e.g., alpha/beta T cells and gamma/delta T cells, B cells, natural killer (NK) cells, natural killer T (NK-T) cells, mast cells, and myeloid-derived phagocytes.

[0463] “Immune effector function or immune effector response,” as that term is used herein, refers to function or response, e.g., of an immune effector cell, that enhances or promotes an immune attack of a target cell. E.g., an immune effector function or response refers a property of a T or NK cell that promotes killing or the inhibition of growth or proliferation, of a target cell. In the case of a T cell, primary stimulation and co-stimulation are examples of immune effector function or response.

[0464] The term “effector function” refers to a specialized function of a cell. Effector function of a T cell, for example, may be cytolytic activity or helper activity including the secretion of cytokines.

[0465] An “intracellular signaling domain,” as the term is used herein, refers to an intracellular portion of a molecule. The intracellular signaling domain can generate a signal that promotes an immune effector function of the CAR containing cell, e.g., a CART cell. Examples of immune effector function, e.g., in a CART cell, include cytolytic activity and helper activity, including the secretion of cytokines. In embodiments, the intracellular signal domain is the portion of the protein which transduces the effector function signal and directs the cell to perform a specialized function. While the entire intracellular signaling domain can be employed, in many cases it is not necessary to use the entire chain. To the extent that a truncated portion of the intracellular signaling domain is used, such truncated portion may be used in place of the intact chain as long as it transduces the effector function signal. The term intracellular signaling domain is thus meant to include any truncated portion of the intracellular signaling domain sufficient to transduce the effector function signal.

[0466] In an embodiment, the intracellular signaling domain can comprise a primary intracellular signaling domain. Exemplary primary intracellular signaling domains include those derived from the molecules responsible for primary stimulation, or antigen dependent simulation. In an embodiment, the intracellular signaling domain can comprise a costimulatory intracellular domain. Exemplary costimulatory intracellular signaling domains include those derived from molecules responsible for costimulatory signals, or antigen independent stimulation. For example, in the case of a CART, a primary intracellular signaling domain can comprise a cytoplasmic sequence of a T cell receptor, and a costimulatory intracellular signaling domain can comprise cytoplasmic sequence from co-receptor or costimulatory molecule.

[0467] A primary intracellular signaling domain can comprise a signaling motif which is known as an immunoreceptor tyrosine-based activation motif or ITAM. Examples of ITAM containing primary cytoplasmic signaling sequences include, but are not limited to, those derived from CD3 zeta, FcR gamma, common FcR gamma (FCER1G), Fe gamma RIIa, FcR beta (Fc Epsilon Rib), CD3 gamma, CD3 delta, CD3 epsilon, CD22, CD79a, CD79b, CD278 (“ICOS”), FcεI, CD66d, CD32, DAP10 and DAP12.

[0468] The term “zeta” or alternatively “zeta chain”, “CD3-zeta” or “TCR-zeta” is defined as the protein provided as GenBank™ Acc. No. BAG36664.1, or the equivalent residues from a non-human species, e.g., mouse, rodent, monkey, ape and the like, and a “zeta stimulatory domain” or alternatively a “CD3-zeta stimulatory domain” or a “TCR-zeta stimulatory domain” is defined as the amino acid residues from the cytoplasmic domain of the zeta chain, or functional derivatives thereof, that are sufficient to functionally transmit an initial signal necessary for T cell activation. In one aspect the cytoplasmic domain of zeta comprises residues 52 through 164 of GenBank™ Acc. No. BAG36664.1 or the equivalent residues from a non-human species, e.g., mouse, rodent, monkey, ape and the like, that are functional orthologs thereof. In one aspect, the “zeta stimulatory domain” or a “CD3-zeta stimulatory domain” is the sequence provided as SEQ ID NO:17. In one aspect, the “zeta stimulatory domain” or a “CD3-zeta stimulatory domain” is the sequence provided as SEQ ID NO:43.

[0469] The term “costimulatory molecule” refers to the cognate binding partner on a T cell that specifically binds with a costimulatory ligand, thereby mediating a costimulatory response by the T cell, such as, but not limited to, proliferation. Costimulatory molecules are cell surface molecules other than antigen receptors or their ligands that contribute to an efficient immune response. Costimulatory molecules include, but are not limited to an MHC class I molecule, TNF receptor proteins, Immunoglobulin-like proteins, cytokine receptors, integrins, signalling lymphocytic activation molecules (SLAM proteins), activating NK cell receptors, BTLA, a Toll ligand receptor, OX40, CD2, CD7, CD27, CD28, CD30, CD40, CDS, ICAM-1, LFA-1 (CD11a/CD18), 4-1BB (CD137), B7-H3, CDS, ICAM-1, ICOS (CD278), GITR, BAFFR, LIGHT, HVEM (LIGHTR), KIRDS2, SLAMF7, NKp80 (KLRF1), NKp44, NKp30, NKp46, CD19, CD4, CD8alpha, CD8beta, IL2R beta, IL2R gamma, IL7R alpha, ITGA4, VLA1, CD49a, ITGA4, IA4, CD49D, ITGA6, VLA-6, CD49f, ITGAD, CD11d, ITGAE, CD103, ITGAL, CD11a, LFA-1, ITGAM, CD11b, ITGAX, CD11c, ITGB1, CD29, ITGB2, CD18, LFA-1, ITGB7, NKG2D, NKG2C, TNFR2, TRANCE/RANKL, DNAM1 (CD226), SLAMF4 (CD244, 2B4), CD84, CD96 (Tactile), CEACAM1, CRTAM, Ly9 (CD229), CD160 (BY55), PSGL1, CD100 (SEMA4D), CD69, SLAMF6 (NTB-A, Ly108), SLAM (SLAMF1, CD150, IPO-3), BLAME (SLAMF8), SELPLG (CD162), LTBR, LAT, GADS, SLP-76, PAG/Cbp, CD19a, and a ligand that specifically binds with CD83.

[0470] A costimulatory intracellular signaling domain refers to the intracellular portion of a costimulatory molecule. The intracellular signaling domain can comprise the entire intracellular portion, or the entire native intracellular signaling domain, of the molecule from which it is derived, or a functional fragment or derivative thereof.

[0471] The term “4-1BB” refers to a member of the TNFR superfamily with an amino acid sequence provided as GenBank™ Acc. No. AAA62478.2, or the equivalent residues from a non-human species, e.g., mouse, rodent, monkey, ape and the like; and a “4-1BB costimulatory domain” is defined as amino acid residues 214-255 of GenBank™ Acc. No. AAA62478.2, or the equivalent residues from a non-human species, e.g., mouse, rodent, monkey, ape and the like. In one aspect, the “4-1BB costimulatory domain” is the sequence provided as SEQ ID NO:16 or the equivalent residues from a non-human species, e.g., mouse, rodent, monkey, ape and the like.

[0472] The term “encoding” refers to the inherent property of specific sequences of nucleotides in a polynucleotide, such as a gene, a cDNA, or an mRNA, to serve as templates for synthesis of other polymers and macromolecules in biological processes having either a defined sequence of nucleotides (e.g., rRNA, tRNA and mRNA) or a defined sequence of amino acids and the biological properties resulting therefrom. Thus, a gene, cDNA, or RNA, encodes a protein if transcription and translation of mRNA corresponding to that gene produces the protein in a cell or other biological system. Both the coding strand, the nucleotide sequence of which is identical to the mRNA sequence and is usually provided in sequence listings, and the non-coding strand, used as the template for transcription of a gene or cDNA, can be referred to as encoding the protein or other product of that gene or cDNA.

[0473] Unless otherwise specified, a “nucleotide sequence encoding an amino acid sequence” includes all nucleotide sequences that are degenerate versions of each other and that encode the same amino acid sequence. The phrase nucleotide sequence that encodes a protein or a RNA may also include introns to the extent that the nucleotide sequence encoding the protein may in some version contain an intron(s).

[0474] The term “effective amount” or “therapeutically effective amount” are used interchangeably herein, and refer to an amount of a compound, formulation, material, or composition, as described herein effective to achieve a particular biological result.

[0475] The term “endogenous” refers to any material from or produced inside an organism, cell, tissue or system.

[0476] The term “exogenous” refers to any material introduced from or produced outside an organism, cell, tissue or system.

[0477] The term “expression” refers to the transcription and/or translation of a particular nucleotide sequence driven by a promoter.

[0478] The term “transfer vector” refers to a composition of matter which comprises an isolated nucleic acid and which can be used to deliver the isolated nucleic acid to the interior of a cell. Numerous vectors are known in the art including, but not limited to, linear polynucleotides, polynucleotides associated with ionic or amphiphilic compounds, plasmids, and viruses. Thus, the term “transfer vector” includes an autonomously replicating plasmid or a virus. The term should also be construed to further include non-plasmid and non-viral compounds which facilitate transfer of nucleic acid into cells, such as, for example, a polylysine compound, liposome, and the like. Examples of viral transfer vectors include, but are not limited to, adenoviral vectors, adeno-associated virus vectors, retroviral vectors, lentiviral vectors, and the like.

[0479] The term “expression vector” refers to a vector comprising a recombinant polynucleotide comprising expression control sequences operatively linked to a nucleotide sequence to be expressed. An expression vector comprises sufficient cis-acting elements for expression; other elements for expression can be supplied by the host cell or in an in vitro expression system. Expression vectors include all those known in the art, including cosmids, plasmids (e.g., naked or contained in liposomes) and viruses (e.g., lentiviruses, retroviruses, adenoviruses, and adeno-associated viruses) that incorporate the recombinant polynucleotide.

[0480] The term “lentivirus” refers to a genus of the Retroviridae family. Lentiviruses are unique among the retroviruses in being able to infect non-dividing cells; they can deliver a significant amount of genetic information into the DNA of the host cell, so they are one of the most efficient methods of a gene delivery vector. HIV, SIV, and FIV are all examples of lentiviruses.

[0481] The term “lentiviral vector” refers to a vector derived from at least a portion of a lentivirus genome, including especially a self-inactivating lentiviral vector as provided in Milone et al., Mol. Ther. 17(8): 1453-1464 (2009). Other examples of lentivirus vectors that may be used in the clinic, include but are not limited to, e.g., the LENTIVECTOR® gene delivery technology from Oxford BioMedica, the LENTIMAX™ vector system from Lentigen and the like. Nonclinical types of lentiviral vectors are also available and would be known to one skilled in the art.

[0482] The term “homologous” or “identity” refers to the subunit sequence identity between two polymeric molecules, e.g., between two nucleic acid molecules, such as, two DNA molecules or two RNA molecules, or between two polypeptide molecules. When a subunit position in both of the two molecules is occupied by the same monomeric subunit; e.g., if a position in each of two DNA molecules is occupied by adenine, then they are homologous or identical at that position. The homology between two sequences is a direct function of the number of matching or homologous positions; e.g., if half (e.g., five positions in a polymer ten subunits in length) of the positions in two sequences are homologous, the two sequences are 50% homologous; if 90% of the positions (e.g., 9 of 10), are matched or homologous, the two sequences are 90% homologous.

[0483] “Humanized” forms of non-human (e.g., murine) antibodies are chimeric immunoglobulins, immunoglobulin chains or fragments thereof (such as Fv, Fab, Fab′, F(ab′)2 or other antigen-binding subsequences of antibodies) which contain minimal sequence derived from non-human immunoglobulin. For the most part, humanized antibodies and antibody fragments thereof are human immunoglobulins (recipient antibody or antibody fragment) in which residues from a complementary-determining region (CDR) of the recipient are replaced by residues from a CDR of a non-human species (donor antibody) such as mouse, rat or rabbit having the desired specificity, affinity, and capacity. In some instances, Fv framework region (FR) residues of the human immunoglobulin are replaced by corresponding non-human residues. Furthermore, a humanized antibody/antibody fragment can comprise residues which are found neither in the recipient antibody nor in the imported CDR or framework sequences. These modifications can further refine and optimize antibody or antibody fragment performance. In general, the humanized antibody or antibody fragment thereof will comprise substantially all of at least one, and typically two, variable domains, in which all or substantially all of the CDR regions correspond to those of a non-human immunoglobulin and all or a significant portion of the FR regions are those of a human immunoglobulin sequence. The humanized antibody or antibody fragment can also comprise at least a portion of an immunoglobulin constant region (Fc), typically that of a human immunoglobulin. For further details, see Jones et al., Nature, 321: 522-525, 1986; Reichmann et al., Nature, 332: 323-329, 1988; Presta, Curr. Op. Struct. Biol., 2: 593-596, 1992.

[0484] “Fully human” refers to an immunoglobulin, such as an antibody or antibody fragment, where the whole molecule is of human origin or consists of an amino acid sequence identical to a human form of the antibody or immunoglobulin.

[0485] The term “isolated” means altered or removed from the natural state. For example, a nucleic acid or a peptide naturally present in a living animal is not “isolated,” but the same nucleic acid or peptide partially or completely separated from the coexisting materials of its natural state is “isolated.” An isolated nucleic acid or protein can exist in substantially purified form, or can exist in a non-native environment such as, for example, a host cell.

[0486] In the context of the present invention, the following abbreviations for the commonly occurring nucleic acid bases are used. “A” refers to adenosine, “C” refers to cytosine, “G” refers to guanosine, “T” refers to thymidine, and “U” refers to uridine.

[0487] The term “operably linked” or “transcriptional control” refers to functional linkage between a regulatory sequence and a heterologous nucleic acid sequence resulting in expression of the latter. For example, a first nucleic acid sequence is operably linked with a second nucleic acid sequence when the first nucleic acid sequence is placed in a functional relationship with the second nucleic acid sequence. For instance, a promoter is operably linked to a coding sequence if the promoter affects the transcription or expression of the coding sequence. Operably linked DNA sequences can be contiguous with each other and, e.g., where necessary to join two protein coding regions, are in the same reading frame.

[0488] The term “parenteral” administration of an immunogenic composition includes, e.g., subcutaneous (s.c.), intravenous (i.v.), intramuscular (i.m.), or intrasternal injection, intratumoral, or infusion techniques.

[0489] The term “nucleic acid” or “polynucleotide” refers to deoxyribonucleic acids (DNA) or ribonucleic acids (RNA) and polymers thereof in either single- or double-stranded form. The term “nucleic acid” includes a gene, cDNA, or an mRNA. In one embodiment, the nucleic acid molecule is synthetic (e.g., chemically synthesized) or recombinant. Unless specifically limited, the term encompasses nucleic acids containing analogues or derivatives of natural nucleotides that have similar binding properties as the reference nucleic acid and are metabolized in a manner similar to naturally occurring nucleotides. Unless otherwise indicated, a particular nucleic acid sequence also implicitly encompasses conservatively modified variants thereof (e.g., degenerate codon substitutions), alleles, orthologs, SNPs, and complementary sequences as well as the sequence explicitly indicated. Specifically, degenerate codon substitutions may be achieved by generating sequences in which the third position of one or more selected (or all) codons is substituted with mixed-base and/or deoxyinosine residues (Batzer et al., Nucleic Acid Res. 19:5081 (1991); Ohtsuka et al., J. Biol. Chem. 260:2605-2608 (1985); and Rossolini et al., Mol. Cell. Probes 8:91-98 (1994)).

[0490] The terms “peptide,” “polypeptide,” and “protein” are used interchangeably, and refer to a compound comprised of amino acid residues covalently linked by peptide bonds. A protein or peptide must contain at least two amino acids, and no limitation is placed on the maximum number of amino acids that can comprise a protein's or peptide's sequence. Polypeptides include any peptide or protein comprising two or more amino acids joined to each other by peptide bonds. As used herein, the term refers to both short chains, which also commonly are referred to in the art as peptides, oligopeptides and oligomers, for example, and to longer chains, which generally are referred to in the art as proteins, of which there are many types. “Polypeptides” include, for example, biologically active fragments, substantially homologous polypeptides, oligopeptides, homodimers, heterodimers, variants of polypeptides, modified polypeptides, derivatives, analogs, fusion proteins, among others. A polypeptide includes a natural peptide, a recombinant peptide, or a combination thereof.

[0491] As used herein, the term “plurality” refers to two or more.

[0492] The term “promoter” refers to a DNA sequence recognized by the synthetic machinery of the cell, or introduced synthetic machinery, required to initiate the specific transcription of a polynucleotide sequence.

[0493] The term “promoter/regulatory sequence” refers to a nucleic acid sequence which is required for expression of a gene product operably linked to the promoter/regulatory sequence. In some instances, this sequence may be the core promoter sequence and in other instances, this sequence may also include an enhancer sequence and other regulatory elements which are required for expression of the gene product. The promoter/regulatory sequence may, for example, be one which expresses the gene product in a tissue specific manner.

[0494] The term “constitutive” promoter refers to a nucleotide sequence which, when operably linked with a polynucleotide which encodes or specifies a gene product, causes the gene product to be produced in a cell under most or all physiological conditions of the cell.

[0495] The term “inducible” promoter refers to a nucleotide sequence which, when operably linked with a polynucleotide which encodes or specifies a gene product, causes the gene product to be produced in a cell substantially only when an inducer which corresponds to the promoter is present in the cell.

[0496] The term “tissue-specific” promoter refers to a nucleotide sequence which, when operably linked with a polynucleotide encodes or specified by a gene, causes the gene product to be produced in a cell substantially only if the cell is a cell of the tissue type corresponding to the promoter.

[0497] The term “flexible polypeptide linker” or “linker” as used in the context of a scFv refers to a peptide linker that consists of amino acids such as glycine and/or serine residues used alone or in combination, to link variable heavy and variable light chain regions together. In one embodiment, the flexible polypeptide linker is a Gly/Ser linker and comprises the amino acid sequence (Gly-Gly-Gly-Ser)n, where n is a positive integer equal to or greater than 1. For example, n=1, n=2, n=3. n=4, n=5, n=6, n=7, n=8, n=9 and n=10 (SEQ ID NO:105). In one embodiment, the flexible polypeptide linkers include, but are not limited to, (Gly₄ Ser)₄ (SEQ ID NO:106) or (Gly₄ Ser)₃ (SEQ ID NO:107). In another embodiment, the linkers include multiple repeats of (Gly₂Ser), (GlySer) or (Gly₃Ser) (SEQ ID NO:108). Also included within the scope of the invention are linkers described in WO2012/138475, incorporated herein by reference.

[0498] As used herein, a 5′ cap (also termed an RNA cap, an RNA 7-methylguanosine cap or an RNA m⁷G cap) is a modified guanine nucleotide that has been added to the “front” or 5′ end of a eukaryotic messenger RNA shortly after the start of transcription. The 5′ cap consists of a terminal group which is linked to the first transcribed nucleotide. Its presence is important for recognition by the ribosome and protection from RNases. Cap addition is coupled to transcription, and occurs co-transcriptionally, such that each influences the other. Shortly after the start of transcription, the 5′ end of the mRNA being synthesized is bound by a cap-synthesizing complex associated with RNA polymerase. This enzymatic complex catalyzes the chemical reactions that are required for mRNA capping. Synthesis proceeds as a multi-step biochemical reaction. The capping moiety can be modified to modulate functionality of mRNA such as its stability or efficiency of translation.

[0499] As used herein, “in vitro transcribed RNA” refers to RNA, e.g., mRNA, that has been synthesized in vitro. Generally, the in vitro transcribed RNA is generated from an in vitro transcription vector. The in vitro transcription vector comprises a template that is used to generate the in vitro transcribed RNA.

[0500] As used herein, a “poly(A)” is a series of adenosines attached by polyadenylation to the mRNA. In some embodiments of a construct for transient expression, the polyA is between 50 and 5000 (SEQ ID NO: 28), e.g., greater than 64, e.g., greater than 100, e.g., than 300 or 400. Poly(A) sequences can be modified chemically or enzymatically to modulate mRNA functionality such as localization, stability or efficiency of translation.

[0501] As used herein, “polyadenylation” refers to the covalent linkage of a polyadenylyl moiety, or its modified variant, to a messenger RNA molecule. In eukaryotic organisms, most messenger RNA (mRNA) molecules are polyadenylated at the 3′ end. The 3′ poly(A) tail is a long sequence of adenine nucleotides (often several hundred) added to the pre-mRNA through the action of an enzyme, polyadenylate polymerase. In higher eukaryotes, the poly(A) tail is added onto transcripts that contain a specific sequence, the polyadenylation signal. The poly(A) tail and the protein bound to it aid in protecting mRNA from degradation by exonucleases. Polyadenylation is also important for transcription termination, export of the mRNA from the nucleus, and translation. Polyadenylation occurs in the nucleus immediately after transcription of DNA into RNA, but additionally can also occur later in the cytoplasm. After transcription has been terminated, the mRNA chain is cleaved through the action of an endonuclease complex associated with RNA polymerase. The cleavage site is usually characterized by the presence of the base sequence AAUAAA near the cleavage site. After the mRNA has been cleaved, adenosine residues are added to the free 3′ end at the cleavage site.

[0502] As used herein, “transient” refers to expression of a non-integrated transgene for a period of hours, days or weeks, wherein the period of time of expression is less than the period of time for expression of the gene if integrated into the genome or contained within a stable plasmid replicon in the host cell.

[0503] The term “signal transduction pathway” refers to the biochemical relationship between a variety of signal transduction molecules that play a role in the transmission of a signal from one portion of a cell to another portion of a cell. The phrase “cell surface receptor” includes molecules and complexes of molecules capable of receiving a signal and transmitting signal across the membrane of a cell.

[0504] The term “subject” is intended to include living organisms in which an immune response can be elicited (e.g., mammals, human).

[0505] The term, a “substantially purified” cell refers to a cell that is essentially free of other cell types. A substantially purified cell also refers to a cell which has been separated from other cell types with which it is normally associated in its naturally occurring state. In some instances, a population of substantially purified cells refers to a homogenous population of cells. In other instances, this term refers simply to cell that have been separated from the cells with which they are naturally associated in their natural state. In some aspects, the cells are cultured in vitro. In other aspects, the cells are not cultured in vitro.

[0506] The term “therapeutic” as used herein means a treatment. A therapeutic effect is obtained by reduction, suppression, remission, or eradication of a disease state.

[0507] The term “prophylaxis” as used herein means the prevention of or protective treatment for a disease or disease state.

[0508] In the context of the present invention, “tumor antigen” or “hyperproliferative disorder antigen” or “antigen associated with a hyperproliferative disorder” refers to antigens that are common to specific hyperproliferative disorders. In certain aspects, the hyperproliferative disorder antigens of the present invention are derived from, cancers including but not limited to primary or metastatic melanoma, thymoma, lymphoma, sarcoma, lung cancer, liver cancer, non-Hodgkin lymphoma, Hodgkin lymphoma, leukemias, uterine cancer, cervical cancer, bladder cancer, kidney cancer and adenocarcinomas such as breast cancer, prostate cancer, ovarian cancer, pancreatic cancer, and the like.

[0509] The term “transfected” or “transformed” or “transduced” refers to a process by which exogenous nucleic acid is transferred or introduced into the host cell. A “transfected” or “transformed” or “transduced” cell is one which has been transfected, transformed or transduced with exogenous nucleic acid. The cell includes the primary subject cell and its progeny.

[0510] A subject “responds” to treatment if a parameter of a cancer (e.g., a hematological cancer, e.g., cancer cell growth, proliferation and/or survival) in the subject is retarded or reduced by a detectable amount, e.g., about 5%, 10%, 20%, 30%, 40%, 50%, 60%, 70%, 80%, 90% or more as determined by any appropriate measure, e.g., by mass, cell count or volume. In one example, a subject responds to treatment if the subject experiences a life expectancy extended by about 5%, 10%, 20%, 30%, 40%, 50% or more beyond the life expectancy predicted if no treatment is administered. In another example, a subject responds to treatment, if the subject has an increased disease-free survival, overall survival or increased time to progression. Several methods can be used to determine if a patient responds to a treatment including, for example, criteria provided by NCCN Clinical Practice Guidelines in Oncology (NCCN Guidelines@). For example, in the context of B-ALL, a complete response or complete responder, may involve one or more of: <5% BM blast, >1000 neutrophil/ANC (/μL). >100,000 platelets (/μL) with no circulating blasts or extramedullary disease (no lymphadenopathy, splenomegaly, skin/gum infiltration/testicular mass/CNS involvement), Trilineage hematopoiesis, and no recurrence for 4 weeks. A partial responder may involve one or more of >50% reduction in BM blast, >1000 neutrophil/ANC (/μL). >100,000 platelets (/μL). A non-responder can show disease progression, e.g., >25% in BM blasts.

[0511] “Refractory” as used herein refers to a disease, e.g., cancer, that does not respond to a treatment. In embodiments, a refractory cancer can be resistant to a treatment before or at the beginning of the treatment. In other embodiments, the refractory cancer can become resistant during a treatment. A refractory cancer is also called a resistant cancer.

[0512] The term “relapse” as used herein refers to reappearance of a cancer after an initial period of responsiveness (e.g., complete response or partial response). The initial period of responsiveness may involve the level of cancer cells falling below a certain threshold, e.g., below 20%, 1%, 10%, 5%, 4%, 3%, 2%, or 1%. The reappearance may involve the level of cancer cells rising above a certain threshold, e.g., above 20%, 1%, 10%, 5%, 4%, 3%, 2%, or 1%. For example, e.g., in the context of B-ALL, the reappearance may involve, e.g., a reappearance of blasts in the blood, bone marrow (>5%), or any extramedullary site, after a complete response. A complete response, in this context, may involve <5% BM blast. More generally, in an embodiment, a response (e.g., complete response or partial response) can involve the absence of detectable MRD (minimal residual disease). In an embodiment, the initial period of responsiveness lasts at least 1, 2, 3, 4, 5, or 6 days; at least 1, 2, 3, or 4 weeks; at least 1, 2, 3, 4, 6, 8, 10, or 12 months; or at least 1, 2, 3, 4, or 5 years.

[0513] In some embodiments, a therapy that includes a CD19 inhibitor, e.g., a CD19 CAR therapy, may relapse or be refractory to treatment. The relapse or resistance can be caused by CD19 loss (e.g., an antigen loss mutation) or other CD19 alteration that reduces the level of CD19 (e.g., caused by clonal selection of CD19-negative clones). A cancer that harbors such CD19 loss or alteration is referred to herein as a “CD19-negative cancer” or a “CD19-negative relapsed cancer”). It shall be understood that a CD19-negative cancer need not have 100% loss of CD19, but a sufficient reduction to reduce the effectiveness of a CD19 therapy such that the cancer relapses or becomes refractory. In some embodiments, a CD19-negative cancer results from a CD19 CAR therapy.

[0514] The term “specifically binds,” refers to an antibody, or a ligand, which recognizes and binds with a binding partner (e.g., a stimulatory tumor antigen) protein present in a sample, but which antibody or ligand does not substantially recognize or bind other molecules in the sample.

[0515] As used herein, the term “pharmaceutically acceptable salt” refers to those salts which are, within the scope of sound medical judgment, suitable for use in contact with the tissues of subjects without undue toxicity, irritation, allergic response and the like, and are commensurate with a reasonable benefit/risk ratio. Pharmaceutically acceptable salts are well known in the art. For example, Berge et al. describes pharmaceutically acceptable salts in detail in J. Pharmaceutical Sciences (1977) 66:1-19.

[0516] “Regulatable chimeric antigen receptor (RCAR),” as that term is used herein, refers to a set of polypeptides, typically two in the simplest embodiments, which when in a RCARX cell, provides the RCARX cell with specificity for a target cell, typically a cancer cell, and with regulatable intracellular signal generation or proliferation, which can optimize an immune effector property of the RCARX cell. An RCARX cell relies at least in part, on an antigen binding domain to provide specificity to a target cell that comprises the antigen bound by the antigen binding domain. In an embodiment, an RCAR includes a dimerization switch that, upon the presence of a dimerization molecule, can couple an intracellular signaling domain to the antigen binding domain.

[0517] “Membrane anchor” or “membrane tethering domain”, as that term is used herein, refers to a polypeptide or moiety, e.g., a myristoyl group, sufficient to anchor an extracellular or intracellular domain to the plasma membrane.

[0518] “Switch domain,” as that term is used herein, e.g., when referring to an RCAR, refers to an entity, typically a polypeptide-based entity, that, in the presence of a dimerization molecule, associates with another switch domain. The association results in a functional coupling of a first entity linked to, e.g., fused to, a first switch domain, and a second entity linked to, e.g., fused to, a second switch domain. A first and second switch domain are collectively referred to as a dimerization switch. In embodiments, the first and second switch domains are the same as one another, e.g., they are polypeptides having the same primary amino acid sequence, and are referred to collectively as a homodimerization switch. In embodiments, the first and second switch domains are different from one another, e.g., they are polypeptides having different primary amino acid sequences, and are referred to collectively as a heterodimerization switch. In embodiments, the switch is intracellular. In embodiments, the switch is extracellular. In embodiments, the switch domain is a polypeptide-based entity, e.g., FKBP or FRB-based, and the dimerization molecule is small molecule, e.g., a rapalogue. In embodiments, the switch domain is a polypeptide-based entity, e.g., an scFv that binds a myc peptide, and the dimerization molecule is a polypeptide, a fragment thereof, or a multimer of a polypeptide, e.g., a myc ligand or multimers of a myc ligand that bind to one or more myc scFvs. In embodiments, the switch domain is a polypeptide-based entity, e.g., myc receptor, and the dimerization molecule is an antibody or fragments thereof, e.g., myc antibody.

[0519] “Dimerization molecule,” as that term is used herein, e.g., when referring to an RCAR, refers to a molecule that promotes the association of a first switch domain with a second switch domain. In embodiments, the dimerization molecule does not naturally occur in the subject, or does not occur in concentrations that would result in significant dimerization. In embodiments, the dimerization molecule is a small molecule, e.g., rapamycin or a rapalogue, e.g., RAD001.

[0520] The term “low, immune enhancing, dose” when used in conjunction with an mTOR inhibitor, e.g., an allosteric mTOR inhibitor, e.g., RAD001 or rapamycin, or a catalytic mTOR inhibitor, refers to a dose of mTOR inhibitor that partially, but not fully, inhibits mTOR activity, e.g., as measured by the inhibition of P70 S6 kinase activity. Methods for evaluating mTOR activity, e.g., by inhibition of P70 S6 kinase, are discussed herein. The dose is insufficient to result in complete immune suppression but is sufficient to enhance the immune response. In an embodiment, the low, immune enhancing, dose of mTOR inhibitor results in a decrease in the number of PD-1 positive T cells and/or an increase in the number of PD-1 negative T cells, or an increase in the ratio of PD-1 negative T cells/PD-1 positive T cells. In an embodiment, the low, immune enhancing, dose of mTOR inhibitor results in an increase in the number of naïve T cells. In an embodiment, the low, immune enhancing, dose of mTOR inhibitor results in one or more of the following:
[0521] an increase in the expression of one or more of the following markers: CD62L^{high} CD127^{high}, CD27⁺, and BCL2, e.g., on memory T cells, e.g., memory T cell precursors;
[0522] a decrease in the expression of KLRG1, e.g., on memory T cells, e.g., memory T cell precursors; and
[0523] an increase in the number of memory T cell precursors, e.g., cells with any one or combination of the following characteristics: increased CD62L^{high} increased CD127^{high} increased CD27⁺, decreased KLRG1, and increased BCL2;
   wherein any of the changes described above occurs, e.g., at least transiently, e.g., as compared to a non-treated subject.

[0524] Ranges: throughout this disclosure, various aspects of the invention can be presented in a range format. It should be understood that the description in range format is merely for convenience and brevity and should not be construed as an inflexible limitation on the scope of the invention. Accordingly, the description of a range should be considered to have specifically disclosed all the possible subranges as well as individual numerical values within that range. For example, description of a range such as from 1 to 6 should be considered to have specifically disclosed subranges such as from 1 to 3, from 1 to 4, from 1 to 5, from 2 to 4, from 2 to 6, from 3 to 6 etc., as well as individual numbers within that range, for example, 1, 2, 2.7, 3, 4, 5, 5.3, and 6. As another example, a range such as 95-99% identity, includes something with 95%, 96%, 97%, 98% or 99% identity, and includes subranges such as 96-99%, 96-98%, 96-97%, 97-99%, 97-98% and 98-99% identity. This applies regardless of the breadth of the range.

### DESCRIPTION

### CD19 Inhibitors, Binding Domains and CARs

[0525] Provided herein are compositions of matter and methods of use for the treatment of a disease such as cancer using CD19 chimeric antigen receptors (CAR). The methods include, inter alia, administering a CD19 CAR described herein in combination with another agent such as B-cell inhibitor. The methods also include, e.g., administering a CD19 CAR described herein to treat a lymphoma such as Hodgkin lymphoma.

[0526] In one aspect, the invention provides a number of chimeric antigen receptors (CAR) comprising an antibody or antibody fragment engineered for specific binding to a CD19 protein. In one aspect, the invention provides a cell (e.g., T cell) engineered to express a CAR, wherein the CAR T cell (“CART”) exhibits an anticancer property. In one aspect a cell is transformed with the CAR and the CAR is expressed on the cell surface. In some embodiments, the cell (e.g., T cell) is transduced with a viral vector encoding a CAR. In some embodiments, the viral vector is a retroviral vector. In some embodiments, the viral vector is a lentiviral vector. In some such embodiments, the cell may stably express the CAR. In another embodiment, the cell (e.g., T cell) is transfected with a nucleic acid, e.g., mRNA, cDNA, DNA, encoding a CAR. In some such embodiments, the cell may transiently express the CAR.

[0527] In one aspect, the anti-CD19 protein binding portion of the CAR is a scFv antibody fragment. In one aspect such antibody fragments are functional in that they retain the equivalent binding affinity, e.g., they bind the same antigen with comparable affinity, as the IgG antibody from which it is derived. In one aspect such antibody fragments are functional in that they provide a biological response that can include, but is not limited to, activation of an immune response, inhibition of signal-transduction origination from its target antigen, inhibition of kinase activity, and the like, as will be understood by a skilled artisan. In one aspect, the anti-CD19 antigen binding domain of the CAR is a scFv antibody fragment that is humanized compared to the murine sequence of the scFv from which it is derived. In one aspect, the parental murine scFv sequence is the CAR19 construct provided in PCT publication WO2012/079000 and provided herein as SEQ ID NO:59. In one embodiment, the anti-CD19 binding domain is a scFv described in WO2012/079000 and provided in SEQ ID NO:59, or a sequence at least 95%, e.g., 95-99%, identical thereto. In an embodiment, the anti-CD19 binding domain is part of a CAR construct provided in PCT publication WO2012/079000 and provided herein as SEQ ID NO:58, or a sequence at least 95%, e.g., 95%-99%, identical thereto. In an embodiment, the anti-CD19 binding domain comprises at least one (e.g., 2, 3, 4, 5, or 6) CDRs selected from Table 4 and/or Table 5.

[0528] In some aspects, the antibodies of the invention are incorporated into a chimeric antigen receptor (CAR). In one aspect, the CAR comprises the polypeptide sequence provided as SEQ ID NO: 12 in PCT publication WO2012/079000, and provided herein as SEQ ID NO: 58, wherein the scFv domain is substituted by one or more sequences selected from SEQ ID NOS: 1-12. In one aspect, the scFv domains of SEQ ID NOS:1-12 are humanized variants of the scFv domain of SEQ ID NO:59, which is an scFv fragment of murine origin that specifically binds to human CD19. Humanization of this mouse scFv may be desired for the clinical setting, where the mouse-specific residues may induce a human-anti-mouse antigen (HAMA) response in patients who receive CART19 treatment, e.g., treatment with T cells transduced with the CAR19 construct.

[0529] In one embodiment, the CD19 CAR comprises an amino acid sequence provided as SEQ ID NO: 12 in PCT publication WO2012/079000. In embodiment, the amino acid sequence is:

(SEQ ID NO: 58)
MALPVTALLLPLALLLHAARPdiqmtqttsslsaslgdrvtiscrasqd
iskylnwyqqkpdgtvklliyhtsrlhsgvpsrfsgsgsgtdysltisn
leqediatyfcqqgntlpytfgggtkleitggggsggggsggggsevkl
qesgpglvapsqslsvtctvsgvslpdygvswirqpprkglewlgviwg
settyynsalksrltiikdnsksqvflkmnslqtddtaiyycakhyyyg
gsyamdywgqgtsvtvsstttpaprpptpaptiasqplslrpeacrpaa
ggavhtrgldfacdiyiwaplagtcgvlllslvitlyckrgrkkllyif
kqpfmrpvqttqeedgescrfpeeeeggcelrvkfsrsadapaykqgqn
qlynelnlgrreeydvldkrrgrdpemggkprrknpqeglynelqkdkm
aeayseigmkgerrrgkghdglyqglstatkdtydalhmqalppr,

[0530] In embodiment, the amino acid sequence is

(SEQ ID NO: 1633)
diqmtqttsslsaslgdrvtiscrasqdiskylnwyqqkpdgtvklliy
htsrlhsgvpsrfsgsgsgtdysltisnleqediatyfcqqgntlpytf
gggtkleitggggsggggsggggsevklqesgpglvapsqslsvtctvs
gvslpdygvswirqpprkglewlgviwgsettyynsalksrltiikdns
ksqvflkmnslqtddtaiyycakhyyyggsyamdywgqgtsvtvssttt
paprpptpaptiasqplslrpeacrpaaggavhtrgldfacdiyiwapl
agtcgvlllslvitlyckrgrkkllyifkqpfmrpvqttqeedgccrfp
eeeeggcelrvkfsrsadapaykqgqnqlynelnlgrreeydvldkrrg
rdpemggkprrknpqeglynelqkdkmaeayseigmkgerrrgkghdgl
yqglstatkdtydalhmqalppr,

[0531] In one embodiment, the CD19 CAR has the USAN designation TISAGENLECLEUCEL-T. In embodiments, CTL019 is made by a gene modification of T cells is mediated by stable insertion via transduction with a self-inactivating, replication deficient Lentiviral (LV) vector containing the CTL019 transgene under the control of the EF-1 alpha promoter. CTL019 can be a mixture of transgene positive and negative T cells that are delivered to the subject on the basis of percent transgene positive T cells.

[0532] In one aspect, the humanized CAR19 comprises the scFv portion provided in SEQ ID NO:1. In one aspect, the humanized CAR19 comprises the scFv portion provided in SEQ ID NO:2. In one aspect, the humanized CAR19 comprises the scFv portion provided in SEQ ID NO:3. In one aspect, the humanized CAR19 comprises the scFv portion provided in SEQ ID NO:4. In one aspect, the humanized CAR19 comprises the scFv portion provided in SEQ ID NO:5. In one aspect, the humanized CAR19 comprises the scFv portion provided in SEQ ID NO:6. In one aspect, the humanized CAR19 comprises the scFv portion provided in SEQ ID NO:7. In one aspect, the humanized CAR19 comprises the scFv portion provided in SEQ ID NO:8. In one aspect, the humanized CAR19 comprises the scFv portion provided in SEQ ID NO:9. In one aspect, the humanized CAR19 comprises the scFv portion provided in SEQ ID NO:10. In one aspect, the humanized CAR19 comprises the scFv portion provided in SEQ ID NO:11. In one aspect, the humanized CAR19 comprises the scFv portion provided in SEQ ID NO:12.

[0533] In one aspect, the CARs of the invention combine an antigen binding domain of a specific antibody with an intracellular signaling molecule. For example, in some aspects, the intracellular signaling molecule includes, but is not limited to, CD3-zeta chain, 4-1BB and CD28 signaling modules and combinations thereof. In one aspect, the CD19 CAR comprises a CAR selected from the sequence provided in one or more of SEQ ID NOS: 31-42. In one aspect, the CD19 CAR comprises the sequence provided in SEQ ID NO:31. In one aspect, the CD19 CAR comprises the sequence provided in SEQ ID NO:32. In one aspect, the CD19 CAR comprises the sequence provided in SEQ ID NO:33. In one aspect, the CD19 CAR comprises the sequence provided in SEQ ID NO:34. In one aspect, the CD19 CAR comprises the sequence provided in SEQ ID NO:35. In one aspect, the CD19 CAR comprises the sequence provided in SEQ ID NO:36. In one aspect, the CD19 CAR comprises the sequence provided in SEQ ID NO:37. In one aspect, the CD19 CAR comprises the sequence provided in SEQ ID NO:38. In one aspect, the CD19 CAR comprises the sequence provided in SEQ ID NO:39. In one aspect, the CD19 CAR comprises the sequence provided in SEQ ID NO:40. In one aspect, the CD19 CAR comprises the sequence provided in SEQ ID NO:41. In one aspect, the CD19 CAR comprises the sequence provided in SEQ ID NO:42.

[0534] In embodiments, the CAR molecule is a CD19 CAR molecule described herein, e.g., a humanized CAR molecule described herein, e.g., a humanized CD19 CAR molecule of Table 2 or having CDRs as set out in Tables 4 and 5.

[0535] In embodiments, the CAR molecule is a CD19 CAR molecule described herein, e.g., a murine CAR molecule described herein, e.g., a murine CD19 CAR molecule of Table 3 or having CDRs as set out in Tables 4 and 5.

[0536] In some embodiments, the CAR molecule comprises one, two, and/or three CDRs from the heavy chain variable region and/or one, two, and/or three CDRs from the light chain variable region of the murine or humanized CD19 CAR of Table 4 and 5.

[0537] In one embodiment, the antigen binding domain comprises one, two three (e.g., all three) heavy chain CDRs, HC CDR1, HC CDR2 and HC CDR3, from an antibody listed above, and/or one, two, three (e.g., all three) light chain CDRs, LC CDR1, LC CDR2 and LC CDR3, from an antibody listed above. In one embodiment, the antigen binding domain comprises a heavy chain variable region and/or a variable light chain region of an antibody listed or described above.

[0538] In an embodiment, the antigen binding domain comprises a humanized antibody or an antibody fragment. In one embodiment, the humanized anti-CD19 binding domain comprises one or more (e.g., all three) light chain complementary determining region 1 (LC CDR1), light chain complementary determining region 2 (LC CDR2), and light chain complementary determining region 3 (LC CDR3) of a murine or humanized anti-CD19 binding domain described herein, and/or one or more (e.g., all three) heavy chain complementary determining region 1 (HC CDR1), heavy chain complementary determining region 2 (HC CDR2), and heavy chain complementary determining region 3 (HC CDR3) of a murine or humanized anti-CD19 binding domain described herein, e.g., a humanized anti-CD19 binding domain comprising one or more, e.g., all three, LC CDRs and one or more, e.g., all three, HC CDRs.

[0539] In one embodiment, an antigen binding domain comprises one, two three (e.g., all three) heavy chain CDRs, HC CDR1, HC CDR2 and HC CDR3, from an antibody listed herein, e.g., in Table 2, 4, or 5 and/or one, two, three (e.g., all three) light chain CDRs, LC CDR1, LC CDR2 and LC CDR3, from an antibody listed herein, e.g., in Table 2, 4, or 5. In one embodiment, the antigen binding domain comprises a heavy chain variable region and/or a variable light chain region of an antibody listed or described above.

[0540] In an embodiment, the CD19 binding domain (e.g., an scFv) comprises: a light chain variable region comprising an amino acid sequence having at least one, two or three modifications (e.g., substitutions) but not more than 30, 20 or 10 modifications (e.g., substitutions) of an amino acid sequence of a light chain variable region provided in Table 2, or a sequence with 95-99% identity with an amino acid sequence of Table 2; and/or a heavy chain variable region comprising an amino acid sequence having at least one, two or three modifications (e.g., substitutions) but not more than 30, 20 or 10 modifications (e.g., substitutions) of an amino acid sequence of a heavy chain variable region provided in Table 2, or a sequence with 95-99% identity to an amino acid sequence of Table 2. In embodiments, the CD19 binding domain comprises one or more CDRs (e.g., one each of a HC CDR1, HC CDR2, HC CDR3, LC CDR1, LC CDR2, and LC CDR3) of Table 4 or Table 5, or CDRs having one, two, three, four, five, or six modifications (e.g., substitutions) of one or more of the CDRs.

[0541] Exemplary anti-CD19 antibody molecules (including antibodies or fragments or conjugates thereof) can include a scFv, CDRs, or VH and VL chains described in Tables 2, 4, or 5. In an embodiment, the CD19-binding antibody molecule comprises: a light chain variable region comprising an amino acid sequence having at least one, two or three modifications (e.g., substitutions) but not more than 30, 20 or 10 modifications (e.g., substitutions) of an amino acid sequence of a light chain variable region provided in Table 2, or a sequence with 95-99% identity with an amino acid sequence of Table 2; and/or a heavy chain variable region comprising an amino acid sequence having at least one, two or three modifications (e.g., substitutions) but not more than 30, 20 or 10 modifications (e.g., substitutions) of an amino acid sequence of a heavy chain variable region provided in Table 2, or a sequence with 95-99% identity to an amino acid sequence of Table 2. In embodiments, the CD19-binding antibody molecule comprises one or more CDRs (e.g., one each of a HC CDR1, HC CDR2, HC CDR3, LC CDR1, LC CDR2, and LC CDR3) of Table 4 or Table 5, or CDRs having one, two, three, four, five, or six modifications (e.g., substitutions) of one or more of the CDRs. The antibody molecule may be, e.g., an isolated antibody molecule.

[0542] In some embodiments, the humanized anti-CD19 binding domain comprises a HC CDR1, a HC CDR2, and a HC CDR3 of any heavy chain binding domain amino acid sequences listed in Table 2. In embodiments, the antigen binding domain further comprises a LC CDR1, a LC CDR2, and a LC CDR3. In embodiments, the antigen binding domain comprises a LC CDR1, a LC CDR2, and a LC CDR3 of any light chain binding domain amino acid sequences listed in Table 2.

[0543] In some embodiments, the antigen binding domain comprises one, two or all of LC CDR1, LC CDR2, and LC CDR3 of any light chain binding domain amino acid sequences listed in Table 2, and one, two or all of HC CDR1, HC CDR2, and HC CDR3 of any heavy chain binding domain amino acid sequences listed in Table 2.

[0544] In some embodiments, the CDRs are defined according to the Kabat numbering scheme, the Chothia numbering scheme, or a combination thereof.

[0545] The sequences of humanized CDR sequences of the scFv domains are shown in Table 4 for the heavy chain variable domains and in Table 5 for the light chain variable domains. “ID” stands for the respective SEQ ID NO for each CDR.

[0546] In some embodiments, the CD19 binding domain comprises a Kabat HCDR1 having a sequence of DYGVS (SEQ ID NO: 1634), an HCDR2 of Table 4, an HCDR3 of Table 4, an LCDR1 of Table 5, an LCDR2 of Table 5, and an LCDR3 of Table 5.

[0547] In one embodiment, the humanized anti-CD19 binding domain comprises a sequence selected from a group consisting of SEQ ID NO:1, SEQ ID NO:2, SEQ ID NO:3, SEQ ID NO:4, SEQ ID NO:5, SEQ ID NO:6, SEQ ID NO:7, SEQ ID NO:8, SEQ ID NO:9, SEQ ID NO:10, SEQ ID NO:11, and SEQ ID NO:12, or a sequence with 95-99% identity thereof. In one embodiment, the nucleic acid sequence encoding the humanized anti-CD19 binding domain comprises a sequence selected from a group consisting of SEQ ID NO:61, SEQ ID NO:62, SEQ ID NO:63, SEQ ID NO:64, SEQ ID NO:65, SEQ ID NO:66, SEQ ID NO:67, SEQ ID NO:68, SEQ ID NO:70, SEQ ID NO:71 and SEQ ID NO:72, or a sequence with 95-99% identity thereof.

[0548] In one embodiment, the humanized anti-CD19 binding domain is a scFv, and a light chain variable region comprising an amino acid sequence described herein, e.g., in Table 2, is attached to a heavy chain variable region comprising an amino acid sequence described herein, e.g., in Table 2, via a linker, e.g., a linker described herein. In one embodiment, the humanized anti-CD19 binding domain includes a (Gly₄-Ser)n linker, wherein n is 1, 2, 3, 4, 5, or 6, e.g., 3 or 4 (SEQ ID NO:53). The light chain variable region and heavy chain variable region of a scFv can be, e.g., in any of the following orientations: light chain variable region-linker-heavy chain variable region or heavy chain variable region-linker-light chain variable region.

[0549] In one aspect, the antigen binding domain portion comprises one or more sequence selected from SEQ ID NOS:1-12. In one aspect the humanized CAR is selected from one or more sequence selected from SEQ ID NOS: 31-42. In some aspects, a non-human antibody is humanized, where specific sequences or regions of the antibody are modified to increase similarity to an antibody naturally produced in a human or fragment thereof.

[0550] In one embodiment, the anti-CD19 binding domain comprises a murine light chain variable region described herein (e.g., in Table 3) and/or a murine heavy chain variable region described herein (e.g., in Table 3). In one embodiment, the anti-CD19 binding domain is a scFv comprising a murine light chain and a murine heavy chain of an amino acid sequence of Table 3. In an embodiment, the anti-CD19 binding domain (e.g., an scFv) comprises: a light chain variable region comprising an amino acid sequence having at least one, two or three modifications (e.g., substitutions) but not more than 30, 20 or 10 modifications (e.g., substitutions) of an amino acid sequence of a light chain variable region provided in Table 3, or a sequence with 95-99% identity with an amino acid sequence of Table 3; and/or a heavy chain variable region comprising an amino acid sequence having at least one, two or three modifications (e.g., substitutions) but not more than 30, 20 or 10 modifications (e.g., substitutions) of an amino acid sequence of a heavy chain variable region provided in Table 3, or a sequence with 95-99% identity to an amino acid sequence of Table 3. In one embodiment, the anti-CD19 binding domain comprises a sequence of SEQ ID NO:59, or a sequence with 95-99% identity thereof. In one embodiment, the anti-CD19 binding domain is a scFv, and a light chain variable region comprising an amino acid sequence described herein, e.g., in Table 3, is attached to a heavy chain variable region comprising an amino acid sequence described herein, e.g., in Table 3, via a linker, e.g., a linker described herein. In one embodiment, the antigen binding domain includes a (Gly₄-Ser)n linker, wherein n is 1, 2, 3, 4, 5, or 6, e.g., 3 or 4 (SEQ ID NO: 53). The light chain variable region and heavy chain variable region of a scFv can be, e.g., in any of the following orientations: light chain variable region-linker-heavy chain variable region or heavy chain variable region-linker-light chain variable region.

[0551] In embodiments, the CAR molecule comprises a CD19 inhibitor comprising an antibody or antibody fragment which includes a CD19 binding domain, a transmembrane domain, and an intracellular signaling domain comprising a stimulatory domain, and wherein said CD19 binding domain comprises one or more of (e.g., all three of) light chain complementary determining region 1 (LC CDR1), light chain complementary determining region 2 (LC CDR2), and light chain complementary determining region 3 (LC CDR3) of any CD19 light chain binding domain amino acid sequence listed in Tables 2 or 3, and one or more of (e.g., all three of) heavy chain complementary determining region 1 (HC CDR1), heavy chain complementary determining region 2 (HC CDR2), and heavy chain complementary determining region 3 (HC CDR3) of any CD19 heavy chain binding domain amino acid sequence listed in Tables 2 or 3.

[0552] In embodiments, a CD19 CAR comprises light chain variable region listed in Tables 2 or 3 and any heavy chain variable region listed Tables 2 or 3.

[0553] In embodiments, the CD19 inhibitor comprises a CD19 binding domain which comprises a sequence selected from a group consisting of SEQ ID NO:1, SEQ ID NO:2, SEQ ID NO:3, SEQ ID NO: 4, SEQ ID NO:5, SEQ ID NO:6, SEQ ID NO:7, SEQ ID NO:8, SEQ ID NO:9, SEQ ID NO:10, SEQ ID NO:11 and SEQ ID NO:12, or a sequence with 95-99% identity thereof. In embodiments, the CD19 CAR comprises a polypeptide of SEQ ID NO:58.

[0554] In one embodiment, the CAR molecule comprises an anti-CD19 binding domain comprising one or more (e.g., all three) light chain complementary determining region 1 (LC CDR1), light chain complementary determining region 2 (LC CDR2), and light chain complementary determining region 3 (LC CDR3) of an anti-CD19 binding domain described herein, and one or more (e.g., all three) heavy chain complementary determining region 1 (HC CDR1), heavy chain complementary determining region 2 (HC CDR2), and heavy chain complementary determining region 3 (HC CDR3) of an anti-CD19 binding domain described herein, e.g., an anti-CD19 binding domain comprising one or more, e.g., all three, LC CDRs and one or more, e.g., all three, HC CDRs. In one embodiment, the anti-CD19 binding domain comprises one or more (e.g., all three) heavy chain complementary determining region 1 (HC CDR1), heavy chain complementary determining region 2 (HC CDR2), and heavy chain complementary determining region 3 (HC CDR3) of an anti-CD19 binding domain described herein, e.g., the anti-CD19 binding domain has two variable heavy chain regions, each comprising a HC CDR1, a HC CDR2 and a HC CDR3 described herein.

[0555] In one aspect, the anti-CD19 binding domain is characterized by particular functional features or properties of an antibody or antibody fragment. For example, in one aspect, the portion of a CAR composition of the invention that comprises an antigen binding domain specifically binds human CD19. In one aspect, the invention relates to an antigen binding domain comprising an antibody or antibody fragment, wherein the antibody binding domain specifically binds to a CD19 protein or fragment thereof, wherein the antibody or antibody fragment comprises a variable light chain and/or a variable heavy chain that includes an amino acid sequence of SEQ ID NO: 1-12 or SEQ ID NO:59. In one aspect, the antigen binding domain comprises an amino acid sequence of an scFv selected from SEQ ID NOs: 1-12 or SEQ ID NO:59. In certain aspects, the scFv is contiguous with and in the same reading frame as a leader sequence. In one aspect the leader sequence is the polypeptide sequence provided as SEQ ID NO:13.

[0556] In one aspect, the portion of the CAR comprising the antigen binding domain comprises an antigen binding domain that targets CD19. In one aspect, the antigen binding domain targets human CD19. In one aspect, the antigen binding domain of the CAR has the same or a similar binding specificity as, or includes, the FMC63 scFv fragment described in Nicholson et al. Mol. Immun. 34 (16-17): 1157-1165 (1997). In one aspect, the portion of the CAR comprising the antigen binding domain comprises an antigen binding domain that targets a B-cell antigen, e.g., a human B-cell antigen. A CD19 antibody molecule can be, e.g., an antibody molecule (e.g., a humanized anti-CD19 antibody molecule) described in WO2014/153270, which is incorporated herein by reference in its entirety. WO2014/153270 also describes methods of assaying the binding and efficacy of various CART constructs.

[0557] In some embodiments, the CD19 CAR comprises an antigen binding domain derived from (e.g., comprises an amino acid sequence of) an anti-CD19 antibody (e.g., an anti-CD19 mono- or bispecific antibody) or a fragment or conjugate thereof. In one embodiment, the anti-CD19 antibody is a humanized antigen binding domain as described in WO2014/153270 (e.g., Table 3 of WO2014/153270) incorporated herein by reference, or a conjugate thereof. Other exemplary anti-CD19 antibodies or fragments or conjugates thereof, include but are not limited to, a bispecific T cell engager that targets CD19 (e.g., blinatumomab), SAR3419 (Sanofi), MEDI-551 (MedImmune LLC), Combotox, DT2219ARL (Masonic Cancer Center), MOR-208 (also called XmAb-5574; MorphoSys), XmAb-5871 (Xencor), MDX-1342 (Bristol-Myers Squibb), SGN-CD19A (Seattle Genetics), and AFM11 (Affimed Therapeutics). See, e.g., Hammer. MAbs. 4.5(2012): 571-77. Blinatomomab is a bispecific antibody comprised of two scFvs-one that binds to CD19 and one that binds to CD3. Blinatomomab directs T cells to attack cancer cells. See, e.g., Hammer et al.; Clinical Trial Identifier No. NCT00274742 and NCT01209286. MEDI-551 is a humanized anti-CD19 antibody with a Fc engineered to have enhanced antibody-dependent cell-mediated cytotoxicity (ADCC). See, e.g., Hammer et al.; and Clinical Trial Identifier No. NCT01957579. Combotox is a mixture of immunotoxins that bind to CD19 and CD22. The immunotoxins are made up of scFv antibody fragments fused to a deglycosylated ricin A chain. See, e.g., Hammer et al.; and Herrera et al. J. Pediatr. Hematol. Oncol. 31.12(2009):936-41; Schindler et al. Br. J. Haematol. 154.4(2011):471-6. DT2219ARL is a bispecific immunotoxin targeting CD19 and CD22, comprising two scFvs and a truncated diphtheria toxin. See, e.g., Hammer et al.; and Clinical Trial Identifier No. NCT00889408. SGN-CD19A is an antibody-drug conjugate (ADC) comprised of an anti-CD19 humanized monoclonal antibody linked to a synthetic cytotoxic cell-killing agent, monomethyl auristatin F (MMAF). See, e.g., Hammer et al.; and Clinical Trial Identifier Nos. NCT01786096 and NCT01786135. SAR3419 is an anti-CD19 antibody-drug conjugate (ADC) comprising an anti-CD19 humanized monoclonal antibody conjugated to a maytansine derivative via a cleavable linker, See, e.g., Younes et al, J. Chin. Oncol. 30.2(2012): 2776-82; Hammer et al,; Clinical Trial Identifier No. NCT00549185; and Blanc et al. Clin Cancer Res. 2011; 17:6448-58. XmAb-5871 is an Fc-engineered, humanized anti-CD19 antibody. See, e.g., Hammer et al. MDX-1342 is a human Fc-engineered anti-CD19 antibody with enhanced ADCC. See, e.g., Hammer et al. In embodiments, the antibody molecule is a bispecific anti-CD19 and anti-CD3 molecule. For instance, AFM11 is a bispecific antibody that targets CD19 and CD3. See, e.g., Hammer et al.; and Clinical Trial Identifier No. NCT02106091. In some embodiments, an anti-CD19 antibody described herein is conjugated or otherwise bound to a therapeutic agent, e.g., a chemotherapeutic agent, peptide vaccine (such as that described in Izumoto et al. 2008 J Neurosurg 108:963-971), immunosuppressive agent, or immunoablative agent, e.g., cyclosporin, azathioprine, methotrexate, mycophenolate, FK506, CAMPATH, anti-CD3 antibody, cytoxin, fludarabine, rapamycin, mycophenolic acid, steroid, FR901228, or cytokine.

[0558] In one embodiment, an antigen binding domain against CD19 is an antigen binding portion, e.g., CDRs, of an antigen binding domain described in a Table herein. In one embodiment, a CD19 antigen binding domain can be from any CD19 CAR, e.g., LG-740; U.S. Pat. Nos. 8,399,645; 7,446,190; Xu et al., Leuk Lymphoma. 2013 54(2):255-260(2012); Cruz et al., Blood 122(17):2965-2973 (2013); Brentjens et al., Blood, 118(18):4817-4828 (2011); Kochenderfer et al., Blood 116(20):4099-102 (2010); Kochenderfer et al., Blood 122 (25):4129-39(2013); and 16th Annu Meet Am Soc Gen Cell Ther (ASGCT) (May 15-18, Salt Lake City) 2013, Abst 10, each of which is herein incorporated by reference in its entirety.

[0559] In embodiments, the CAR molecule comprises a CD19 CAR molecule described herein, e.g., a CD19 CAR molecule described in US-2015-0283178-A1, e.g., CTL019. In embodiments, the CD19 CAR comprises an amino acid, or has a nucleotide sequence shown in US-2015-0283178-A1, incorporated herein by reference.

[0560] In one aspect, the invention provides a cell (e.g., T cell) engineered to express a chimeric antigen receptor (CAR), wherein the CAR-expressing cell, e.g., CAR T cell (“CART”) exhibits an anticancer property. A suitable antigen is CD19. In one aspect, the antigen binding domain of the CAR comprises a partially humanized anti-CD19 antibody fragment. In one aspect, the antigen binding domain of the CAR comprises a partially humanized anti-CD19 antibody fragment comprising an scFv. Accordingly, the invention provides (among other things) a CD19-CAR that comprises a humanized anti-CD19 binding domain and is engineered into an immune effector cell, e.g., a T cell or an NK cell, and methods of their use for adoptive therapy.

[0561] In one aspect, the CAR, e.g., CD19-CAR comprises at least one intracellular domain selected from the group of a CD137 (4-1BB) signaling domain, a CD28 signaling domain, a CD3zeta signal domain, and any combination thereof. In one aspect, the CAR, e.g., CD19-CAR comprises at least one intracellular signaling domain is from one or more co-stimulatory molecule(s) other than a CD137 (4-1BB) or CD28.

### Exemplary CD19 CAR Constructs

[0562] Of the CD19 CAR constructs described in International Application WO2014/153270, certain sequences are reproduced herein. It is understood that the sequences in this section can also be used in the context of other CARs, e.g., BCMA CARs.

[0563] The sequences of the murine scFv fragments (SEQ ID NOS: 98, 109, 111 and 114) are provided below in Table 3. Full CAR constructs were generated using SEQ ID NOs: 98, 109, 111 and 114 with additional sequences, SEQ ID NOs: 13-17, shown below, to generate full CAR constructs with SEQ ID NOs: 58, 110, 112, 113 and 115.

[0564] The sequences of the humanized scFv fragments (SEQ ID NOS: 1-12) are provided below in Table 2. Full CAR constructs were generated using SEQ ID NOs: 1-12 with additional sequences, SEQ ID NOs: 13-17, shown below, to generate full CAR constructs with SEQ ID NOs: 31-42.

leader (amino acid sequence)
(SEQ ID NO: 13)
MALPVTALLLPLALLLHAARP
leader (nucleic acid sequence)
(SEQ ID NO: 54)
ATGGCCCTGCCTGTGACAGCCCTGCTGCTGCCTCTGGCTCTGCTGCTGCA
TGCCGCTAGACCC
CD8 hinge (amino acid sequence)
(SEQ ID NO: 14)
TTTPAPRPPTPAPTIASQPLSLRPEACRPAAGGAVHTRGLDFACD
CD8 hinge (nucleic acid sequence)
(SEQ ID NO: 55)
ACCACGACGCCAGCGCCGCGACCACCAACACCGGCGCCCACCATCGCGTC
GCAGCCCCTGTCCCTGCGCCCAGAGGCGTGCCGGCCAGCGGCGGGGGGCG
CAGTGCACACGAGGGGGCTGGACTTCGCCTGTGAT
CD8 transmembrane (amino acid sequence)
(SEQ ID NO: 15)
IYIWAPLAGTCGVLLLSLVITLYC
transmembrane (nucleic acid sequence)
(SEQ ID NO: 56)
ATCTACATCTGGGCGCCCTTGGCCGGGACTTGTGGGGTCCTTCTCCTGTC
ACTGGTTATCACCCTTTACTGC
4-1BB Intracellular domain (amino acid sequence)
(SEQ ID NO: 16)
KRGRKKLLYIFKQPFMRPVQTTQEEDGCSCRFPEEEEGGCEL
4-1BB Intracellular domain (nucleic acid sequence)
(SEQ ID NO: 60)
AAACGGGGCAGAAAGAAACTCCTGTATATATTCAAACAACCATTTATGAG
ACCAGTACAAACTACTCAAGAGGAAGATGGCTGTAGCTGCCGATTTCCAG
AAGAAGAAGAAGGAGGATGTGAACTG
CD3 zeta domain (amino acid sequence)
(SEQ ID NO: 17)
RVKFSRSADAPAYKQGQNQLYNELNLGRREEYDVLDKRRGRDPEMGGKPR
RKNPQEGLYNELQKDKMAEAYSEIGMKGERRRGKGHDGLYQGLSTATKDT
YDALHMQALPPR
CD3 zeta (nucleic acid sequence)
(SEQ ID NO: 101)
AGAGTGAAGTTCAGCAGGAGCGCAGACGCCCCCGCGTACAAGCAGGGCCA
GAACCAGCTCTATAACGAGCTCAATCTAGGACGAAGAGAGGAGTACGATG
TTTTGGACAAGAGACGTGGCCGGGACCCTGAGATGGGGGGAAAGCCGAGA
AGGAAGAACCCTCAGGAAGGCCTGTACAATGAACTGCAGAAAGATAAGAT
GGCGGAGGCCTACAGTGAGATTGGGATGAAAGGCGAGCGCCGGAGGGGCA
AGGGGCACGATGGCCTTTACCAGGGTCTCAGTACAGCCACCAAGGACACC
TACGACGCCCTTCACATGCAGGCCCTGCCCCCTCGC
CD3 zeta domain (amino acid sequence; NCBI
Reference Sequence NM_000734.3)
(SEQ ID NO: 43)
RVKFSRSADAPAYQQGQNQLYNELNLGRREEYDVLDKRRGRDPEMGGKPR
RKNPQEGLYNELQKDKMAEAYSEIGMKGERRRGKGHDGLYQGLSTATKDT
YDALHMQALPPR
CD3 zeta (nucleic acid sequence; NCBI Reference
Sequence NM_000734.3);
(SEQ ID NO: 44)
AGAGTGAAGTTCAGCAGGAGCGCAGACGCCCCCGCGTACCAGCAGGGCCA
GAACCAGCTCTATAACGAGCTCAATCTAGGACGAAGAGAGGAGTACGATG
TTTTGGACAAGAGACGTGGCCGGGACCCTGAGATGGGGGGAAAGCCGAGA
AGGAAGAACCCTCAGGAAGGCCTGTACAATGAACTGCAGAAAGATAAGAT
GGCGGAGGCCTACAGTGAGATTGGGATGAAAGGCGAGCGCCGGAGGGGCA
AGGGGCACGATGGCCTTTACCAGGGTCTCAGTACAGCCACCAAGGACACC
TACGACGCCCTTCACATGCAGGCCCTGCCCCCTCGC
CD28 domain
(amino acid sequence, SEQ ID NO: 1317)
RSKRSRLLHSDYMNMTPRRPGPTRKHYQPYAPPRDFAAYRS
CD28 domain
(nucleotide sequence, SEQ ID NO: 1318)
AGGAGTAAGAGGAGCAGGCTCCTGCACAGTGACTACATGAACATGACTCC
CCGCCGCCCCGGGCCCACCCGCAAGCATTACCAGCCCTATGCCCCACCAC
GCGACTTCGCAGCCTATCGCTCC
Wild-type ICOS domain
(amino acid sequence, SEQ ID NO: 1319)
TKKKYSSSVHDPNGEYMFMRAVNTAKKSRLTDVTL
Wild-type ICOS domain
(nucleotide sequence, SEQ ID NO: 1320)
ACAAAAAAGAAGTATTCATCCAGTGTGCACGACCCTAACGGTGAATACAT
GTTCATGAGAGCAGTGAACACAGCCAAAAAATCCAGACTCACAGATGTGA
CCCTA
Y to F mutant ICOS domain
(amino acid sequence, SEQ ID NO: 1321)
TKKKYSSSVHDPNGEFMFMRAVNTAKKSRLTDVTL
IgG4 Hinge (amino acid sequence)
(SEQ ID NO: 102)
ESKYGPPCPPCPAPEFLGGPSVFLFPPKPKDTLMISRTPEVTCVVVDVSQ
EDPEVQFNWYVDGVEVHNAKTKPREEQFNSTYRVVSVLTVLHQDWLNGKE
YKCKVSNKGLPSSIEKTISKAKGQPREPQVYTLPPSQEEMTKNQVSLTCL
VKGFYPSDIAVEWESNGQPENNYKTTPPVLDSDGSFFLYSRLTVDKSRWQ
EGNVFSCSVMHEALHNHYTQKSLSLSLGKM
IgG4 Hinge (nucleotide sequence)
(SEQ ID NO: 103)
GAGAGCAAGTACGGCCCTCCCTGCCCCCCTTGCCCTGCCCCCGAGTTCCT
GGGCGGACCCAGCGTGTTCCTGTTCCCCCCCAAGCCCAAGGACACCCTGA
TGATCAGCCGGACCCCCGAGGTGACCTGTGTGGTGGTGGACGTGTCCCAG
GAGGACCCCGAGGTCCAGTTCAACTGGTACGTGGACGGCGTGGAGGTGCA
CAACGCCAAGACCAAGCCCCGGGAGGAGCAGTTCAATAGCACCTACCGGG
TGGTGTCCGTGCTGACCGTGCTGCACCAGGACTGGCTGAACGGCAAGGAA
TACAAGTGTAAGGTGTCCAACAAGGGCCTGCCCAGCAGCATCGAGAAAAC
CATCAGCAAGGCCAAGGGCCAGCCTCGGGAGCCCCAGGTGTACACCCTGC
CCCCTAGCCAAGAGGAGATGACCAAGAACCAGGTGTCCCTGACCTGCCTG
GTGAAGGGCTTCTACCCCAGCGACATCGCCGTGGAGTGGGAGAGCAACGG
CCAGCCCGAGAACAACTACAAGACCACCCCCCCTGTGCTGGACAGCGACG
GCAGCTTCTTCCTGTACAGCCGGCTGACCGTGGACAAGAGCCGGTGGCAG
GAGGGCAACGTCTTTAGCTGCTCCGTGATGCACGAGGCCCTGCACAACCA
CTACACCCAGAAGAGCCTGAGCCTGTCCCTGGGCAAGATG

[0565] The CAR scFv fragments were then cloned into lentiviral vectors to create a full length CAR construct in a single coding frame, and using the EF1 alpha promoter for expression (SEQ ID NO: 100).

EF-1 alpha promoter
(SEQ ID NO: 100)
CGTGAGGCTCCGGTGCCCGTCAGTGGGCAGAGCGCACATCGCCCACAGTC
CCCGAGAAGTTGGGGGGAGGGGTCGGCAATTGAACCGGTGCCTAGAGAAG
GTGGCGCGGGGTAAACTGGGAAAGTGATGTCGTGTACTGGCTCCGCCTTT
TTCCCGAGGGTGGGGGAGAACCGTATATAAGTGCAGTAGTCGCCGTGAAC
GTTCTTTTTCGCAACGGGTTTGCCGCCAGAACACAGGTAAGTGCCGTGTG
TGGTTCCCGCGGGCCTGGCCTCTTTACGGGTTATGGCCCTTGCGTGCCTT
GAATTACTTCCACCTGGCTGCAGTACGTGATTCTTGATCCCGAGCTTCGG
GTTGGAAGTGGGTGGGAGAGTTCGAGGCCTTGCGCTTAAGGAGCCCCTTC
GCCTCGTGCTTGAGTTGAGGCCTGGCCTGGGCGCTGGGGCCGCCGCGTGC
GAATCTGGTGGCACCTTCGCGCCTGTCTCGCTGCTTTCGATAAGTCTCTA
GCCATTTAAAATTTTTGATGACCTGCTGCGACGCTTTTTTTCTGGCAAGA
TAGTCTTGTAAATGCGGGCCAAGATCTGCACACTGGTATTTCGGTTTTTG
GGGCCGCGGGCGGCGACGGGGCCCGTGCGTCCCAGCGCACATGTTCGGCG
AGGCGGGGCCTGCGAGCGCGGCCACCGAGAATCGGACGGGGGTAGTCTCA
AGCTGGCCGGCCTGCTCTGGTGCCTGGCCTCGCGCCGCCGTGTATCGCCC
CGCCCTGGGCGGCAAGGCTGGCCCGGTCGGCACCAGTTGCGTGAGCGGAA
AGATGGCCGCTTCCCGGCCCTGCTGCAGGGAGCTCAAAATGGAGGACGCG
GCGCTCGGGAGAGCGGGCGGGTGAGTCACCCACACAAAGGAAAAGGGCCT
TTCCGTCCTCAGCCGTCGCTTCATGTGACTCCACGGAGTACCGGGCGCCG
TCCAGGCACCTCGATTAGTTCTCGAGCTTTTGGAGTACGTCGTCTTTAGG
TTGGGGGGAGGGGTTTTATGCGATGGAGTTTCCCCACACTGAGTGGGTGG
AGACTGAAGTTAGGCCAGCTTGGCACTTGATGTAATTCTCCTTGGAATTT
GCCCTTTTTGAGTTTGGATCTTGGTTCATTCTCAAGCCTCAGACAGTGGT
TCAAAGTTTTTTTCTTCCATTTCAGGTGTCGTGA.

[0566] In embodiments, these clones contain a Q/K residue change in the signal domain of the co-stimulatory domain derived from 4-1BB.

[0567] In one aspect, the anti-CD19 binding domain, e.g., humanized scFv, portion of a CAR of the invention is encoded by a transgene whose sequence has been codon optimized for expression in a mammalian cell. In one aspect, entire CAR construct of the invention is encoded by a transgene whose entire sequence has been codon optimized for expression in a mammalian cell. Codon optimization refers to the discovery that the frequency of occurrence of synonymous codons (i.e., codons that code for the same amino acid) in coding DNA is biased in different species. Such codon degeneracy allows an identical polypeptide to be encoded by a variety of nucleotide sequences. A variety of codon optimization methods is known in the art, and include, e.g., methods disclosed in at least U.S. Pat. Nos. 5,786,464 and 6,114,148.

[0568] The present disclosure encompasses, but is not limited to, a recombinant DNA construct comprising sequences encoding a CAR, wherein the CAR comprises an antibody or antibody fragment that binds specifically to CD19, wherein the sequence of the antibody fragment is contiguous with and in the same reading frame as a nucleic acid sequence encoding an intracellular signaling domain. The intracellular signaling domain can comprise a costimulatory signaling domain and/or a primary signaling domain, e.g., a zeta chain. The costimulatory signaling domain refers to a portion of the CAR comprising at least a portion of the intracellular domain of a costimulatory molecule. In one embodiment, the antigen binding domain is a murine antibody or antibody fragment described herein. In one embodiment, the antigen binding domain is a humanized antibody or antibody fragment.

[0569] In specific aspects, a CAR construct of the invention comprises a scFv domain selected from the group consisting of SEQ ID NOS:1-12 or an scFV domain of SEQ ID NO:59, wherein the scFv may be preceded by an optional leader sequence such as provided in SEQ ID NO: 13, and followed by an optional hinge sequence such as provided in SEQ ID NO:14 or SEQ ID NO:45 or SEQ ID NO:47 or SEQ ID NO:49, a transmembrane region such as provided in SEQ ID NO:15, an intracellular signalling domain that includes SEQ ID NO:16 or SEQ ID NO:51 and a CD3 zeta sequence that includes SEQ ID NO:17 or SEQ ID NO:43, wherein the domains are contiguous with and in the same reading frame to form a single fusion protein.

[0570] Also included in the invention (among other things) is a nucleotide sequence that encodes the polypeptide of each of the scFv fragments selected from the group consisting of SEQ IS NO:1, SEQ ID NO:2, SEQ ID NO:3, SEQ ID NO:4, SEQ ID NO:5, SEQ IS NO:6, SEQ ID NO:7, SEQ ID NO:8, SEQ ID NO:9, SEQ ID NO:10, SEQ ID NO:11, SEQ ID NO:12 and SEQ ID NO:59. Also included in the invention (among other things) is a nucleotide sequence that encodes the polypeptide of each of the scFv fragments selected from the group consisting of SEQ IS NO:1, SEQ ID NO:2, SEQ ID NO:3, SEQ ID NO:4, SEQ ID NO:5, SEQ ID NO:6, SEQ ID NO:7, SEQ ID NO:8, SEQ ID NO:9, SEQ ID NO:10, SEQ ID NO:11, SEQ ID NO:12 and SEQ ID NO:59, and each of the domains of SEQ ID NOS: 13-17, plus an encoded CD19 CAR fusion protein of the invention. In one aspect an exemplary CD19 CAR constructs comprise an optional leader sequence, an extracellular antigen binding domain, a hinge, a transmembrane domain, and an intracellular stimulatory domain. In one aspect an exemplary CD19 CAR construct comprises an optional leader sequence, an extracellular antigen binding domain, a hinge, a transmembrane domain, an intracellular costimulatory domain and an intracellular stimulatory domain. In some embodiments, specific CD19 CAR constructs containing humanized scFv domains of the invention are provided as SEQ ID NOS: 31-42, or a murine scFv domain as provided as SEQ ID NO:59.

[0571] In one aspect the nucleic acid sequence of a CAR construct of the invention is selected from one or more of SEQ ID NOS:85-96. In one aspect the nucleic acid sequence of a CAR construct is SEQ ID NO:85. In one aspect the nucleic acid sequence of a CAR construct is SEQ ID NO:86. In one aspect the nucleic acid sequence of a CAR construct is SEQ ID NO:87. In one aspect the nucleic acid sequence of a CAR construct is SEQ ID NO:88. In one aspect the nucleic acid sequence of a CAR construct is SEQ ID NO:89. In one aspect the nucleic acid sequence of a CAR construct is SEQ ID NO:90. In one aspect the nucleic acid sequence of a CAR construct is SEQ ID NO:91. In one aspect the nucleic acid sequence of a CAR construct is SEQ ID NO:92. In one aspect the nucleic acid sequence of a CAR construct is SEQ ID NO:93. In one aspect the nucleic acid sequence of a CAR construct is SEQ ID NO:94. In one aspect the nucleic acid sequence of a CAR construct is SEQ ID NO:95. In one aspect the nucleic acid sequence of a CAR construct is SEQ ID NO:96. In one aspect the nucleic acid sequence of a CAR construct is SEQ ID NO:97. In one aspect the nucleic acid sequence of a CAR construct is SEQ ID NO:98. In one aspect the nucleic acid sequence of a CAR construct is SEQ ID NO:99.

[0572] Full-length CAR sequences are also provided herein as SEQ ID NOS: 31-42 and 58, as shown in Table 2 (e.g., CTL119) and Table 3 (e.g., CTL019).

[0573] An exemplary leader sequence is provided as SEQ ID NO: 13. An exemplary hinge/spacer sequence is provided as SEQ ID NO: 14 or SEQ ID NO:45 or SEQ ID NO:47 or SEQ ID NO:49. An exemplary transmembrane domain sequence is provided as SEQ ID NO:15. An exemplary sequence of the intracellular signaling domain of the 4-1BB protein is provided as SEQ ID NO: 16. An exemplary sequence of the intracellular signaling domain of CD27 is provided as SEQ ID NO:51. An exemplary CD3zeta domain sequence is provided as SEQ ID NO: 17 or SEQ ID NO:43. These sequences may be used, e.g., in combination with an scFv that recognizes one or more of CD19, CD10, CD20, CD22, CD34, CD123, FLT-3, or ROR1.

[0574] Exemplary sequences of various scFv fragments and other CAR components are provided herein. It is noted that these CAR components (e.g., of SEQ ID NO: 121, or a sequence of Table 2, 3, 6, 11A, 11B, 16, or 25) without a leader sequence (e.g., without the amino acid sequence of SEQ ID NO: 13 or a nucleotide sequence of SEQ ID NO: 54), are also provided herein.

[0575] In embodiments, the CAR sequences described herein contain a Q/K residue change in the signal domain of the co-stimulatory domain derived from CD3zeta chain.

[0576] In one aspect, the present invention encompasses a recombinant nucleic acid construct comprising a nucleic acid molecule encoding a CAR, wherein the nucleic acid molecule comprises the nucleic acid sequence encoding an anti-CD19 binding domain, e.g., described herein, that is contiguous with and in the same reading frame as a nucleic acid sequence encoding an intracellular signaling domain. In one aspect, the anti-CD19 binding domain is selected from one or more of SEQ ID NOS:1-12 and 58. In one aspect, the anti-CD19 binding domain is encoded by a nucleotide residues 64 to 813 of the sequence provided in one or more of SEQ ID NOS:61-72 and 97. In one aspect, the anti-CD19 binding domain is encoded by a nucleotide residues 64 to 813 of SEQ ID NO:61. In one aspect, the anti-CD19 binding domain is encoded by a nucleotide residues 64 to 813 of SEQ ID NO:62. In one aspect, the anti-CD19 binding domain is encoded by a nucleotide residues 64 to 813 of SEQ ID NO:63. In one aspect, the anti-CD19 binding domain is encoded by a nucleotide residues 64 to 813 of SEQ ID NO:64. In one aspect, the anti-CD19 binding domain is encoded by a nucleotide residues 64 to 813 of SEQ ID NO:65. In one aspect, the anti-CD19 binding domain is encoded by a nucleotide residues 64 to 813 of SEQ ID NO:66. In one aspect, the anti-CD19 binding domain is encoded by a nucleotide residues 64 to 813 of SEQ ID NO:67. In one aspect, the anti-CD19 binding domain is encoded by a nucleotide residues 64 to 813 of SEQ ID NO:68. In one aspect, the anti-CD19 binding domain is encoded by a nucleotide residues 64 to 813 of SEQ ID NO:69. In one aspect, the anti-CD19 binding domain is encoded by a nucleotide residues 64 to 813 of SEQ ID NO:70. In one aspect, the anti-CD19 binding domain is encoded by a nucleotide residues 64 to 813 of SEQ ID NO:71. In one aspect, the anti-CD19 binding domain is encoded by a nucleotide residues 64 to 813 of SEQ ID NO:72.

TABLE 2
Humanized CD19 CAR Constructs

| | | |
|---|---|---|
| Name | SEQ ID | Sequence |

CAR 1

| | | |
|---|---|---|
| CAR1 scFv | 1 | EIVMTQSPATLSLSPGERATLSCRASQDISKYLNWYQQKPGQAPRLLIYHT |
| domain | | SRLHSGIPARFSGSGSGTDYTLTISSLQPEDFAVYFCQQGNTLPYTFGQGT |
| | | KLEIKGGGGSGGGGSGGGGSQVQLQESGPGLVKPSETLSLTCTVSGVSLPD |
| | | YGVSWIRQPPGKGLEWIGVIWGSETTYYSSSLKSRVTISKDNSKNQVSLKL |
| | | SSVTAADTAVYYCAKHYYYGGSYAMDYWGQGTLVTVSS |
| 103101 | 61 | atggccctccctgtcaccgccctgctgcttccgctggctcttctgctccacgccgc |
| CAR1 | | tcggcccgaaattgtgatgacccagtcacccgccactcttagcctttcacccggtg |
| Soluble | | agcgcgcaaccctgtcttgcagagcctcccaagacatctcaaaataccttaattgg |
| scFv - nt | | tatcaacagaagcccggacaggctcctcgccttctgatctaccacaccagccggct |
| | | ccattctggaatccctgccaggttcagcggtagcggatctgggaccgactacaccc |
| | | tcactatcagctcactgcagccagaggacttcgctgtctatttctgtcagcaaggg |
| | | aacaccctgccctacacctttggacagggcaccaagctcgagattaaaggtggagg |
| | | tggcagcggaggaggtgggtccggcggtggaggaagccaggtccaactccaagaaa |
| | | gcggaccgggtcttgtgaagccatcagaaactctttcactgacttgtactgtgagc |
| | | ggagtgtctctccccgattacggggtgtcttggatcagacagccaccggggaaggg |
| | | tctggaatggattggagtgatttggggctctgagactacttactactcttcatccc |
| | | tcaagtcacgcgtcaccatctcaaaggacaactctaagaatcaggtgtcactgaaa |
| | | ctgtcatctgtgaccgcagccgacaccgccgtgtactattgcgctaagcattacta |
| | | ttatggcgggagctacgcaatggattactggggacagggtactctggtcaccgtgt |
| | | ccagccaccaccatcatcaccatcaccat |
| 103101 | 73 | MALPVTALLLPLALLLHAARPeivmtqspatlslspgeratlscrasqdiskylnw |
| CAR1 | | yqqkpgqaprlliyhtsrlhsgiparfsgsgsgtdytltisslqpedfavyfcqqg |
| Soluble | | ntlpytfgqgtkleikggggsggggsggggsqvqlqesgpglvkpsetlsltctvs |
| scFv - aa | | gvslpdygvswirqppgkglewigviwgsettyyssslksrvtiskdnsknqvslk |
| | | lssvtaadtavyycakhyyyggsyamdywgqgtlvtvsshhhhhhhh |
| 104875 | 85 | atggccctccctgtcaccgccctgctgcttccgctggctcttctgctccacgccgc |
| CAR 1 - | | tcggcccgaaattgtgatgacccagtcacccgccactcttagcctttcacccggtg |
| Full - nt | | agcgcgcaaccctgtcttgcagagcctcccaagacatctcaaaataccttaattgg |
| | | tatcaacagaagcccggacaggctcctcgccttctgatctaccacaccagccggct |
| | | ccattctggaatccctgccaggttcagcggtagcggatctgggaccgactacaccc |
| | | tcactatcagctcactgcagccagaggacttcgctgtctatttctgtcagcaaggg |
| | | aacaccctgccctacacctttggacagggcaccaagctcgagattaaaggtggagg |
| | | tggcagcggaggaggtgggtccggcggtggaggaagccaggtccaactccaagaaa |
| | | gcggaccgggtcttgtgaagccatcagaaactctttcactgacttgtactgtgagc |
| | | ggagtgtctctccccgattacggggtgtcttggatcagacagccaccggggaaggg |
| | | tctggaatggattggagtgatttggggctctgagactacttactactcttcatccc |
| | | tcaagtcacgcgtcaccatctcaaaggacaactctaagaatcaggtgtcactgaaa |
| | | ctgtcatctgtgaccgcagccgacaccgccgtgtactattgcgctaagcattacta |
| | | ttatggcgggagctacgcaatggattactggggacagggtactctggtcaccgtgt |
| | | ccagcaccactaccccagcaccgaggccacccaccccggctcctaccatcgcctcc |
| | | cagcctctgtccctgcgtccggaggcatgtagacccgcagctggtggggccgtgca |
| | | tacccggggtcttgacttcgcctgcgatatctacatttgggcccctctggctggta |
| | | cttgcggggtcctgctgctttcactcgtgatcactctttactgtaagcgcggtcgg |
| | | aagaagctgctgtacatctttaagcaacccttcatgaggcctgtgcagactactca |
| | | agaggaggacggctgttcatgccggttcccagaggaggaggaaggcggctgcgaac |
| | | tgcgcgtgaaattcagccgcagcgcagatgctccagcctacaagcaggggcagaac |
| | | cagctctacaacgaactcaatcttggtcggagagaggagtacgacgtgctggacaa |
| | | gcggagaggacgggacccagaaatgggcgggaagccgcgcagaaagaatccccaag |
| | | agggcctgtacaacgagctccaaaaggataagatggcagaagcctatagcgagatt |
| | | ggtatgaaaggggaacgcagaagaggcaaaggccacgacggactgtaccagggact |
| | | cagcaccgccaccaaggacacctatgacgctcttcacatgcaggccctgccgcctc |
| | | gg |
| 104875 | 31 | MALPVTALLLPLALLLHAARPeivmtqspatlslspgeratlscrasqdiskylnw |
| CAR 1 - | | yqqkpgqaprlliyhtsrlhsgiparfsgsgsgtdytltisslqpedfavyfcqqg |
| Full - aa | | ntlpytfgqgtkleikggggsggggsggggsqvqlqesgpglvkpsetlsltctvs |
| | | gvslpdygvswirqppgkglewigviwgsettyyssslksrvtiskdnsknqvslk |
| | | lssvtaadtavyycakhyyyggsyamdywgqgtlvtvsstttpaprpptpaptias |
| | | qplslrpeacrpaaggavhtrgldfacdiyiwaplagtcgvlllslvitlyckrgr |
| | | kkllyifkqpfmrpvqttqeedgcscrfpeeeeggcelrvkfsrsadapaykqgqn |
| | | qlynelnlgrreeydvldkrrgrdpemggkprrknpqeglynelqkdkmaeaysei |
| | | gmkgerrrgkghdglyqglstatkdtydalhmqalppr |

CAR2

| | | |
|---|---|---|
| CAR2 scFv | 2 | eivmtqspatlslspgeratlscrasqdiskylnwyqqkpgqaprlliyhtsrlhs |
| domain | | giparfsgsgsgtdytltisslqpedfavyfcqqgntlpytfgqgtkleikggggs |
| | | ggggsggggsqvqlqesgpglvkpsetlsltctvsgvslpdygvswirqppgkgle |
| | | wigviwgsettyyqsslksrvtiskdnsknqvslklssvtaadtavyycakhyyyg |
| | | gsyamdywgqgtlvtvss |
| 103102 | 62 | atggccctccctgtcaccgccctgctgcttccgctggctcttctgctccacgccgc |
| CAR2 - | | tcggcccgaaattgtgatgacccagtcacccgccactcttagcctttcacccggtg |
| Soluble | | agcgcgcaaccctgtcttgcagagcctcccaagacatctcaaaataccttaattgg |
| scFv - nt | | tatcaacagaagcccggacaggctcctcgccttctgatctaccacaccagccggct |
| | | ccattctggaatccctgccaggttcagcggtagcggatctgggaccgactacaccc |
| | | tcactatcagctcactgcagccagaggacttcgctgtctatttctgtcagcaaggg |
| | | aacaccctgccctacacctttggacagggcaccaagctcgagattaaaggtggagg |
| | | tggcagcggaggaggtgggtccggcggtggaggaagccaggtccaactccaagaaa |
| | | gcggaccgggtcttgtgaagccatcagaaactctttcactgacttgtactgtgagc |
| | | ggagtgtctctccccgattacggggtgtcttggatcagacagccaccggggaaggg |
| | | tctggaatggattggagtgatttggggctctgagactacttactaccaatcatccc |
| | | tcaagtcacgcgtcaccatctcaaaggacaactctaagaatcaggtgtcactgaaa |
| | | ctgtcatctgtgaccgcagccgacaccgccgtgtactattgcgctaagcattacta |
| | | ttatggcgggagctacgcaatggattactggggacagggtactctggtcaccgtgt |
| | | ccagccaccaccatcatcaccatcaccat |
| 103102 | 74 | MALPVTALLLPLALLLHAARPeivmtqspatlslspgeratlscrasqdiskylnw |
| CAR2 - | | yqqkpgqaprlliyhtsrlhsgiparfsgsgsgtdytltisslqpedfavyfcqqg |
| Soluble | | ntlpytfgqgtkleikggggsggggsggggsqvqlqesgpglvkpsetlsltctvs |
| scFv - aa | | gvslpdygvswirqppgkglewigviwgsettyyqsslksrvtiskdnsknqvslk |
| | | lssvtaadtavyycakhyyyggsyamdywgqgtlvtvsshhhhhhhh |
| 104876 | 86 | atggccctccctgtcaccgccctgctgcttccgctggctcttctgctccacgccgc |
| CAR 2 - | | tcggcccgaaattgtgatgacccagtcacccgccactcttagcctttcacccggtg |
| Full - nt | | agcgcgcaaccctgtcttgcagagcctcccaagacatctcaaaataccttaattgg |
| (also | | tatcaacagaagcccggacaggctcctcgccttctgatctaccacaccagccggct |
| referred to | | ccattctggaatccctgccaggttcagcggtagcggatctgggaccgactacaccc |
| herein as | | tcactatcagctcactgcagccagaggacttcgctgtctatttctgtcagcaaggg |
| CTL119 | | aacaccctgccctacacctttggacagggcaccaagctcgagattaaaggtggagg |
| nucleotide | | tggcagcggaggaggtgggtccggcggtggaggaagccaggtccaactccaagaaa |
| sequence) | | gcggaccgggtcttgtgaagccatcagaaactctttcactgacttgtactgtgagc |
| | | ggagtgtctctccccgattacggggtgtcttggatcagacagccaccggggaaggg |
| | | tctggaatggattggagtgatttggggctctgagactacttactaccaatcatccc |
| | | tcaagtcacgcgtcaccatctcaaaggacaactctaagaatcaggtgtcactgaaa |
| | | ctgtcatctgtgaccgcagccgacaccgccgtgtactattgcgctaagcattacta |
| | | ttatggcgggagctacgcaatggattactggggacagggtactctggtcaccgtgt |
| | | ccagcaccactaccccagcaccgaggccacccaccccggctcctaccatcgcctcc |
| | | cagcctctgtccctgcgtccggaggcatgtagacccgcagctggtggggccgtgca |
| | | tacccggggtcttgacttcgcctgcgatatctacatttgggcccctctggctggta |
| | | cttgcggggtcctgctgctttcactcgtgatcactctttactgtaagcgcggtcgg |
| | | aagaagctgctgtacatctttaagcaacccttcatgaggcctgtgcagactactca |
| | | agaggaggacggctgttcatgccggttcccagaggaggaggaaggcggctgcgaac |
| | | tgcgcgtgaaattcagccgcagcgcagatgctccagcctacaagcaggggcagaac |
| | | cagctctacaacgaactcaatcttggtcggagagaggagtacgacgtgctggacaa |
| | | gcggagaggacgggacccagaaatgggcgggaagccgcgcagaaagaatccccaag |
| | | agggcctgtacaacgagctccaaaaggataagatggcagaagcctatagcgagatt |
| | | ggtatgaaaggggaacgcagaagaggcaaaggccacgacggactgtaccagggact |
| | | cagcaccgccaccaaggacacctatgacgctcttcacatgcaggccctgccgcctc |
| | | gg |
| 104876 | 32 | MALPVTALLLPLALLLHAARPeivmtqspatlslspgeratlscrasqdiskylnw |
| CAR 2 - | | yqqkpgqaprlliyhtsrlhsgiparfsgsgsgtdytltisslqpedfavyfcqqg |
| Full - aa | | ntlpytfgqgtkleikggggsggggsggggsqvqlqesgpglvkpsetlsltctvs |
| (also | | gvslpdygvswirqppgkglewigviwgsettyyqsslksrvtiskdnsknqvslk |
| referred to | | lssvtaadtavyycakhyyyggsyamdywgqgtlvtvsstttpaprpptpaptias |
| herein as | | qplslrpeacrpaaggavhtrgldfacdiyiwaplagtcgvlllslvitlyckrgr |
| CTL119 | | kkllyifkqpfmrpvqttqeedgcscrfpeeeeggcelrckfsrsadapaykqgqn |
| amino acid | | qlynelnlgrreeydvldkrrgrdpemggkprrknpqeglynelqkdkmaeaysei |
| sequence) | | gmkgerrrgkghdglyqglstatkdtydalhmqalppr |

CAR 3

| | | |
|---|---|---|
| CAR3 scFv | 3 | qvqlqesgpglvkpsetlsltctvsgvslpdygvswirqppgkglewigviwgset |
| domain | | tyyssslksrvtiskdnsknqvslklssvtaadtavyycakhyyyggsyamdywgq |
| | | gtlvtvssggggsggggsggggseivmtqspatlslspgeratlscrasqdiskyl |
| | | nwyqqkpgqaprlliyhtsrlhsgiparfsgsgsgtdytltisslqpedfavyfcq |
| | | qgntlpytfgqgtkleik |
| 103104 | 63 | atggctctgcccgtgaccgcactcctcctgccactggctctgctgcttcacgccgc |
| CAR 3 - | | tcgcccacaagtccagcttcaagaatcagggcctggtctggtgaagccatctgaga |
| Soluble | | ctctgtccctcacttgcaccgtgagcggagtgtccctcccagactacggagtgagc |
| scFv - nt | | tggattagacagcctcccggaaagggactggagtggatcggagtgatttggggtag |
| | | cgaaaccacttactattcatcttccctgaagtcacgggtcaccatttcaaaggata |
| | | actcaaagaatcaagtgagcctcaagctctcatcagtcaccgccgctgacaccgcc |
| | | gtgtattactgtgccaagcattactactatggagggtcctacgccatggactactg |
| | | gggccagggaactctggtcactgtgtcatctggtggaggaggtagcggaggaggcg |
| | | ggagcggtggaggtggctccgaaatcgtgatgacccagagccctgcaaccctgtcc |
| | | ctttctcccggggaacgggctaccctttcttgtcgggcatcacaagatatctcaaa |
| | | atacctcaattggtatcaacagaagccgggacaggcccctaggcttcttatctacc |
| | | acacctctcgcctgcatagcgggattcccgcacgctttagcgggtctggaagcggg |
| | | accgactacactctgaccatctcatctctccagcccgaggacttcgccgtctactt |
| | | ctgccagcagggtaacaccctgccgtacaccttcggccagggcaccaagcttgaga |
| | | tcaaacatcaccaccatcatcaccatcac |
| 103104 | 75 | MALPVTALLLPLALLLHAARPqvqlqesgpglvkpsetlsltctvsgvslpdygvs |
| CAR 3 - | | wirqppgkglewigviwgsettyyssslksrvtiskdnsknqvslklssvtaadta |
| Soluble | | vyycakhyyyggsyamdywgqgtlvtvssggggsggggsggggseivmtqspatls |
| scFv - aa | | lspgeratlscrasqdiskylnwyqqkpgqaprlliyhtsrlhsgiparfsgsgsg |
| | | tdytltisslqpedfavyfcqqgntlpytfgqgtkleikhhhhhhhh |
| 104877 | 87 | atggctctgcccgtgaccgcactcctcctgccactggctctgctgcttcacgccgc |
| CAR 3 - | | tcgcccacaagtccagcttcaagaatcagggcctggtctggtgaagccatctgaga |
| Full - nt | | ctctgtccctcacttgcaccgtgagcggagtgtccctcccagactacggagtgagc |
| | | tggattagacagcctcccggaaagggactggagtggatcggagtgatttggggtag |
| | | cgaaaccacttactattcatcttccctgaagtcacgggtcaccatttcaaaggata |
| | | actcaaagaatcaagtgagcctcaagctctcatcagtcaccgccgctgacaccgcc |
| | | gtgtattactgtgccaagcattactactatggagggtcctacgccatggactactg |
| | | gggccagggaactctggtcactgtgtcatctggtggaggaggtagcggaggaggcg |
| | | ggagcggtggaggtggctccgaaatcgtgatgacccagagccctgcaaccctgtcc |
| | | ctttctcccggggaacgggctaccctttcttgtcgggcatcacaagatatctcaaa |
| | | atacctcaattggtatcaacagaagccgggacaggcccctaggcttcttatctacc |
| | | acacctctcgcctgcatagcgggattcccgcacgctttagcgggtctggaagcggg |
| | | accgactacactctgaccatctcatctctccagcccgaggacttcgccgtctactt |
| | | ctgccagcagggtaacaccctgccgtacaccttcggccagggcaccaagcttgaga |
| | | tcaaaaccactactcccgctccaaggccacccacccctgccccgaccatcgcctct |
| | | cagccgctttccctgcgtccggaggcatgtagacccgcagctggtggggccgtgca |
| | | tacccggggtcttgacttcgcctgcgatatctacatttgggcccctctggctggta |
| | | cttgcggggtcctgctgctttcactcgtgatcactctttactgtaagcgcggtcgg |
| | | aagaagctgctgtacatctttaagcaacccttcatgaggcctgtgcagactactca |
| | | agaggaggacggctgttcatgccggttcccagaggaggaggaaggcggctgcgaac |
| | | tgcgcgtgaaattcagccgcagcgcagatgctccagcctacaagcaggggcagaac |
| | | cagctctacaacgaactcaatcttggtcggagagaggagtacgacgtgctggacaa |
| | | gcggagaggacgggacccagaaatgggcgggaagccgcgcagaaagaatccccaag |
| | | agggcctgtacaacgagctccaaaaggataagatggcagaagcctatagcgagatt |
| | | ggtatgaaaggggaacgcagaagaggcaaaggccacgacggactgtaccagggact |
| | | cagcaccgccaccaaggacacctatgacgctcttcacatgcaggccctgccgcctc |
| | | gg |
| 104877 | 33 | MALPVTALLLPLALLLHAARPqvqlqesgpglvkpsetlsltctvsgvslpdygvs |
| CAR 3 - | | wirqppgkglewigviwgsettyyssslksrvtiskdnsknqvslklssvtaadta |
| Full - aa | | vyycakhyyyggsyamdywgqgtlvtvssggggsggggsggggseivmtqspatls |
| | | lspgeratlscrasqdiskylnwyqqkpgqaprlliyhtsrlhsgiparfsgsgsg |
| | | tdytltisslqpedfavyfcqqgntlpytfgqgtkleiktttpaprpptpaptias |
| | | qplslrpeacrpaaggavhtrgldfacdiyiwaplagtcgvlllslvitlyckrgr |
| | | kkllyifkqpfmrpvqttqeedgcscrfpeeeeggcelrvkfsrsadapaykqgqn |
| | | qlynelnlgrreeydvldkrrgrdpemggkprrknpqeglynelqkdkmaeaysei |
| | | gmkgerrrgkghdglyqglstatkdtydalhmqalppr |

CAR 4

| | | |
|---|---|---|
| CAR4 scFv | 4 | qvqlqesgpglvkpsetlsltctvsgvslpdygvswirqppgkglewigviwgset |
| domain | | tyyqsslksrvtiskdnsknqvslklssvtaadtavyycakhyyyggsyamdywgq |
| | | gtlvtvssggggsggggsggggseivmtqspatlslspgeratlscrasqdiskyl |
| | | nwyqqkpgqaprlliyhtsrlhsgiparfsgsgsgtdytltisslqpedfavyfcq |
| | | qgntlpytfgqgtkleik |
| 103106 | 64 | atggctctgcccgtgaccgcactcctcctgccactggctctgctgcttcacgccgc |
| CAR4 - | | tcgcccacaagtccagcttcaagaatcagggcctggtctggtgaagccatctgaga |
| Soluble | | ctctgtccctcacttgcaccgtgagcggagtgtccctcccagactacggagtgagc |
| scFv - nt | | tggattagacagcctcccggaaagggactggagtggatcggagtgatttggggtag |
| | | cgaaaccacttactatcaatcttccctgaagtcacgggtcaccatttcaaaggata |
| | | actcaaagaatcaagtgagcctcaagctctcatcagtcaccgccgctgacaccgcc |
| | | gtgtattactgtgccaagcattactactatggagggtcctacgccatggactactg |
| | | gggccagggaactctggtcactgtgtcatctggtggaggaggtagcggaggaggcg |
| | | ggagcggtggaggtggctccgaaatcgtgatgacccagagccctgcaaccctgtcc |
| | | ctttctcccggggaacgggctaccctttcttgtcgggcatcacaagatatctcaaa |
| | | atacctcaattggtatcaacagaagccgggacaggcccctaggcttcttatctacc |
| | | acacctctcgcctgcatagcgggattcccgcacgctttagcgggtctggaagcggg |
| | | accgactacactctgaccatctcatctctccagcccgaggacttcgccgtctactt |
| | | ctgccagcagggtaacaccctgccgtacaccttcggccagggcaccaagcttgaga |
| | | tcaaacatcaccaccatcatcaccatcac |
| 103106 | 76 | MALPVTALLLPLALLLHAARPqvqlqesgpglvkpsetlsltctvsgvslpdygvs |
| CAR4 - | | wirqppgkglewigviwgsettyyqsslksrvtiskdnsknqvslklssvtaadta |
| Soluble | | vyycakhyyyggsyamdywgqgtlvtvssggggsggggsggggseivmtqspatls |
| scFv - aa | | lspgeratlscrasqdiskylnwyqqkpgqaprlliyhtsrlhsgiparfsgsgsg |
| | | tdytltisslqpedfavyfcqqgntlpytfgqgtkleikhhhhhhhh |
| 104878 | 88 | atggctctgcccgtgaccgcactcctcctgccactggctctgctgcttcacgccgc |
| CAR 4 - | | tcgcccacaagtccagcttcaagaatcagggcctggtctggtgaagccatctgaga |
| Full - nt | | ctctgtccctcacttgcaccgtgagcggagtgtccctcccagactacggagtgagc |
| | | tggattagacagcctcccggaaagggactggagtggatcggagtgatttggggtag |
| | | cgaaaccacttactatcaatcttccctgaagtcacgggtcaccatttcaaaggata |
| | | actcaaagaatcaagtgagcctcaagctctcatcagtcaccgccgctgacaccgcc |
| | | gtgtattactgtgccaagcattactactatggagggtcctacgccatggactactg |
| | | gggccagggaactctggtcactgtgtcatctggtggaggaggtagcggaggaggcg |
| | | ggagcggtggaggtggctccgaaatcgtgatgacccagagccctgcaaccctgtcc |
| | | ctttctcccggggaacgggctaccctttcttgtcgggcatcacaagatatctcaaa |
| | | atacctcaattggtatcaacagaagccgggacaggcccctaggcttcttatctacc |
| | | acacctctcgcctgcatagcgggattcccgcacgctttagcgggtctggaagcggg |
| | | accgactacactctgaccatctcatctctccagcccgaggacttcgccgtctactt |
| | | ctgccagcagggtaacaccctgccgtacaccttcggccagggcaccaagcttgaga |
| | | tcaaaaccactactcccgctccaaggccacccacccctgccccgaccatcgcctct |
| | | cagccgctttccctgcgtccggaggcatgtagacccgcagctggtggggccgtgca |
| | | tacccggggtcttgacttcgcctgcgatatctacatttgggcccctctggctggta |
| | | cttgcggggtcctgctgctttcactcgtgatcactctttactgtaagcgcggtcgg |
| | | aagaagctgctgtacatctttaagcaacccttcatgaggcctgtgcagactactca |
| | | agaggaggacggctgttcatgccggttcccagaggaggaggaaggcggctgcgaac |
| | | tgcgcgtgaaattcagccgcagcgcagatgctccagcctacaagcaggggcagaac |
| | | cagctctacaacgaactcaatcttggtcggagagaggagtacgacgtgctggacaa |
| | | gcggagaggacgggacccagaaatgggcgggaagccgcgcagaaagaatccccaag |
| | | agggcctgtacaacgagctccaaaaggataagatggcagaagcctatagcgagatt |
| | | ggtatgaaaggggaacgcagaagaggcaaaggccacgacggactgtaccagggact |
| | | cagcaccgccaccaaggacacctatgacgctcttcacatgcaggccctgccgcctc |
| | | gg |
| 104878 | 34 | MALPVTALLLPLALLLHAARPqvqlqesgpglvkpsetlsltctvsgvslpdygvs |
| CAR 4 - | | wirqppgkglewigviwgsettyyqsslksrvtiskdnsknqvslklssvtaadta |
| Full - aa | | vyycakhyyyggsyamdywgqgtlvtvssggggsggggsggggseivmtqspatls |
| | | lspgeratlscrasqdiskylnwyqqkpgqaprlliyhtsrlhsgiparfsgsgsg |
| | | tdytltisslqpedfavyfcqqgntlpytfgqgtkleiktttpaprpptpaptias |
| | | qplslrpeacrpaaggavhtrgldfacdiyiwaplagtcgvlllslvitlyckrgr |
| | | kkllyifkqpfmrpvqttgeedgcscrfpeeeeggcelrvkfsrsadapaykqgqn |
| | | qlynelnlgrreeydvldkrrgrdpemggkprrknpqeglynelqkdkmaeaysei |
| | | gmkgerrrgkghdglyqglstatkdtydalhmqalppr |

CAR 5

| | | |
|---|---|---|
| CAR5 scFv | 5 | eivmtqspatlslspgeratlscrasqdiskylnwyqqkpgqaprlliyhtsrlhs |
| domain | | giparfsgsgsgtdytltisslqpedfavyfcqqgntlpytfgqgtkleikggggs |
| | | ggggsggggsggggsqvqlqesgpglvkpsetlsltctvsgvslpdygvswirqpp |
| | | gkglewigviwgsettyyssslksrvtiskdnsknqvslklssvtaadtavyycak |
| | | hyyyggsyamdywgqgtlvtvss |
| 99789 | 65 | atggccctcccagtgaccgctctgctgctgcctctcgcacttcttctccatgccgc |
| CAR5 - | | tcggcctgagatcgtcatgacccaaagccccgctaccctgtccctgtcacccggcg |
| Soluble | | agagggcaaccctttcatgcagggccagccaggacatttctaagtacctcaactgg |
| scFv - nt | | tatcagcagaagccagggcaggctcctcgcctgctgatctaccacaccagccgcct |
| | | ccacagcggtatccccgccagattttccgggagcgggtctggaaccgactacaccc |
| | | tcaccatctcttctctgcagcccgaggatttcgccgtctatttctgccagcagggg |
| | | aatactctgccgtacaccttcggtcaaggtaccaagctggaaatcaagggaggcgg |
| | | aggatcaggcggtggcggaagcggaggaggtggctccggaggaggaggttcccaag |
| | | tgcagcttcaagaatcaggacccggacttgtgaagccatcagaaaccctctccctg |
| | | acttgtaccgtgtccggtgtgagcctccccgactacggagtctcttggattcgcca |
| | | gcctccggggaagggtcttgaatggattggggtgatttggggatcagagactactt |
| | | actactcttcatcacttaagtcacgggtcaccatcagcaaagataatagcaagaac |
| | | caagtgtcacttaagctgtcatctgtgaccgccgctgacaccgccgtgtactattg |
| | | tgccaaacattactattacggagggtcttatgctatggactactggggacagggga |
| | | ccctggtgactgtctctagccatcaccatcaccaccatcatcac |
| 99789 | 77 | MALPVTALLLPLALLLHAARPeivmtqspatlslspgeratlscrasqdiskylnw |
| CAR5 - | | yqqkpgqaprlliyhtsrlhsgiparfsgsgsgtdytltisslqpedfavyfcqqg |
| Soluble | | ntlpytfgqgtkleikggggsggggsggggsggggsqvqlqesgpglvkpsetlsl |
| scFv - aa | | tctvsgvslpdygvswirqppgkglewigviwgsettyyssslksrvtiskdnskn |
| | | qvslklssvtaadtavyycakhyyyggsyamdywgqgtlvtvsshhhhhhhh |
| 104879 | 89 | atggccctccctgtcaccgccctgctgcttccgctggctcttctgctccacgccgc |
| CAR5 - | | tcggcccgaaattgtgatgacccagtcacccgccactcttagcctttcacccggtg |
| Full - nt | | agcgcgcaaccctgtcttgcagagcctcccaagacatctcaaaataccttaattgg |
| | | tatcaacagaagcccggacaggctcctcgccttctgatctaccacaccagccggct |
| | | ccattctggaatccctgccaggttcagcggtagcggatctgggaccgactacaccc |
| | | tcactatcagctcactgcagccagaggacttcgctgtctatttctgtcagcaaggg |
| | | aacaccctgccctacacctttggacagggcaccaagctcgagattaaaggtggagg |
| | | tggcagcggaggaggtgggtccggcggtggaggaagcggcggaggcgggagccagg |
| | | tccaactccaagaaagcggaccgggtcttgtgaagccatcagaaactctttcactg |
| | | acttgtactgtgagcggagtgtctctccccgattacggggtgtcttggatcagaca |
| | | gccaccggggaagggtctggaatggattggagtgatttggggctctgagactactt |
| | | actactcttcatccctcaagtcacgcgtcaccatctcaaaggacaactctaagaat |
| | | caggtgtcactgaaactgtcatctgtgaccgcagccgacaccgccgtgtactattg |
| | | cgctaagcattactattatggcgggagctacgcaatggattactggggacagggta |
| | | ctctggtcaccgtgtccagcaccactaccccagcaccgaggccacccaccccggct |
| | | cctaccatcgcctcccagcctctgtccctgcgtccggaggcatgtagacccgcagc |
| | | tggtggggccgtgcatacccggggtcttgacttcgcctgcgatatctacatttggg |
| | | cccctctggctggtacttgcggggtcctgctgctttcactcgtgatcactctttac |
| | | tgtaagcgcggtcggaagaagctgctgtacatctttaagcaacccttcatgaggcc |
| | | tgtgcagactactcaagaggaggacggctgttcatgccggttcccagaggaggagg |
| | | aaggcggctgcgaactgcgcgtgaaattcagccgcagcgcagatgctccagcctac |
| | | aagcaggggcagaaccagctctacaacgaactcaatcttggtcggagagaggagta |
| | | cgacgtgctggacaagcggagaggacgggacccagaaatgggcgggaagccgcgca |
| | | gaaagaatccccaagagggcctgtacaacgagctccaaaaggataagatggcagaa |
| | | gcctatagcgagattggtatgaaaggggaacgcagaagaggcaaaggccacgacgg |
| | | actgtaccagggactcagcaccgccaccaaggacacctatgacgctcttcacatgc |
| | | aggccctgccgcctcgg |
| 104879 | 35 | MALPVTALLLPLALLLHAARPeivmtqspatlslspgeratlscrasgdiskylnw |
| CAR 5 - | | yqqkpgqaprlliyhtsrlhsgiparfsgsgsgtdytltisslqpedfavyfcqqg |
| Full - aa | | ntlpytfgqgtkleikggggsggggsggggsggggsqvqlqesgpglvkpsetlsl |
| | | tctvsgvslpdygvswirqppgkglewigviwgsettyyssslksrvtiskdnskn |
| | | qvslklssvtaadtavyycakhyyyggsyamdywgqgtlvtvsstttpaprpptpa |
| | | ptiasqplslrpeacrpaaggavhtrgldfacdiyiwaplagtcgvlllslvitly |
| | | ckrgrkkllyifkqpfmrpvqttqeedgcscrfpeeeeggcelrvkfsrsadapay |
| | | kqgqnqlynelnlgrreeydvldkrrgrdpemggkprrknpqeglynelqkdkmae |
| | | ayseigmkgerrrgkghdglyqglstatkdtydalhmqalppr |

CAR 6

| | | |
|---|---|---|
| CAR6 | 6 | eivmtqspatlslspgeratlscrasqdiskylnwyqqkpgqaprlliyhtsrlhs |
| scFv | | giparfsgsgsgtdytltisslqpedfavyfcqqgntlpytfgqgtkleikggggs |
| domain | | ggggsggggsggggsqvqlqesgpglvkpsetlsltctvsgvslpdygvswirqpp |
| | | gkglewigviwgsettyyqsslksrvtiskdnsknqvslklssvtaadtavyycak |
| | | hyyyggsyamdywgqgtlvtvss |
| 99790 | 66 | atggccctcccagtgaccgctctgctgctgcctctcgcacttcttctccatgccgc |
| CAR6 - | | tcggcctgagatcgtcatgacccaaagccccgctaccctgtccctgtcacccggcg |
| Soluble | | agagggcaaccctttcatgcagggccagccaggacatttctaagtacctcaactgg |
| scFv - nt | | tatcagcagaagccagggcaggctcctcgcctgctgatctaccacaccagccgcct |
| | | ccacagcggtatccccgccagattttccgggagcgggtctggaaccgactacaccc |
| | | tcaccatctcttctctgcagcccgaggatttcgccgtctatttctgccagcagggg |
| | | aatactctgccgtacaccttcggtcaaggtaccaagctggaaatcaagggaggcgg |
| | | aggatcaggcggtggcggaagcggaggaggtggctccggaggaggaggttcccaag |
| | | tgcagcttcaagaatcaggacccggacttgtgaagccatcagaaaccctctccctg |
| | | acttgtaccgtgtccggtgtgagcctccccgactacggagtctcttggattcgcca |
| | | gcctccggggaagggtcttgaatggattggggtgatttggggatcagagactactt |
| | | actaccagtcatcacttaagtcacgggtcaccatcagcaaagataatagcaagaac |
| | | caagtgtcacttaagctgtcatctgtgaccgccgctgacaccgccgtgtactattg |
| | | tgccaaacattactattacggagggtcttatgctatggactactggggacagggga |
| | | ccctggtgactgtctctagccatcaccatcaccaccatcatcac |
| 99790 | 78 | MALPVTALLLPLALLLHAARPeivmtqspatlslspgeratlscrasqdiskylnw |
| CAR6 - | | yqqkpgqaprlliyhtsrlhsgiparfsgsgsgtdytltisslqpedfavyfcqqg |
| Soluble | | ntlpytfgqgtkleikggggsggggsggggsggggsqvqlqesgpglvkpsetlsl |
| scFv - aa | | tctvsgvslpdygvswirqppgkglewigviwgsettyyqsslksrvtiskdnskn |
| | | qvslklssvtaadtavyycakhyyyggsyamdywgqgtlvtvsshhhhhhhh |
| 104880 | 90 | atggccctccctgtcaccgccctgctgcttccgctggctcttctgctccacgccgc |
| CAR6 - | | tcggcccgaaattgtgatgacccagtcacccgccactcttagcctttcacccggtg |
| Full - nt | | agcgcgcaaccctgtcttgcagagcctcccaagacatctcaaaataccttaattgg |
| | | tatcaacagaagcccggacaggctcctcgccttctgatctaccacaccagccggct |
| | | ccattctggaatccctgccaggttcagcggtagcggatctgggaccgactacaccc |
| | | tcactatcagctcactgcagccagaggacttcgctgtctatttctgtcagcaaggg |
| | | aacaccctgccctacacctttggacagggcaccaagctcgagattaaaggtggagg |
| | | tggcagcggaggaggtgggtccggcggtggaggaagcggaggcggagggagccagg |
| | | tccaactccaagaaagcggaccgggtcttgtgaagccatcagaaactctttcactg |
| | | acttgtactgtgagcggagtgtctctccccgattacggggtgtcttggatcagaca |
| | | gccaccggggaagggtctggaatggattggagtgatttggggctctgagactactt |
| | | actaccaatcatccctcaagtcacgcgtcaccatctcaaaggacaactctaagaat |
| | | caggtgtcactgaaactgtcatctgtgaccgcagccgacaccgccgtgtactattg |
| | | cgctaagcattactattatggcgggagctacgcaatggattactggggacagggta |
| | | ctctggtcaccgtgtccagcaccactaccccagcaccgaggccacccaccccggct |
| | | cctaccatcgcctcccagcctctgtccctgcgtccggaggcatgtagacccgcagc |
| | | tggtggggccgtgcatacccggggtcttgacttcgcctgcgatatctacatttggg |
| | | cccctctggctggtacttgcggggtcctgctgctttcactcgtgatcactctttac |
| | | tgtaagcgcggtcggaagaagctgctgtacatctttaagcaacccttcatgaggcc |
| | | tgtgcagactactcaagaggaggacggctgttcatgccggttcccagaggaggagg |
| | | aaggcggctgcgaactgcgcgtgaaattcagccgcagcgcagatgctccagcctac |
| | | aagcaggggcagaaccagctctacaacgaactcaatcttggtcggagagaggagta |
| | | cgacgtgctggacaagcggagaggacgggacccagaaatgggcgggaagccgcgca |
| | | gaaagaatccccaagagggcctgtacaacgagctccaaaaggataagatggcagaa |
| | | gcctatagcgagattggtatgaaaggggaacgcagaagaggcaaaggccacgacgg |
| | | actgtaccagggactcagcaccgccaccaaggacacctatgacgctcttcacatgc |
| | | aggccctgccgcctcgg |
| 104880 | 36 | MALPVTALLLPLALLLHAARPeivmtqspatlslspgeratlscrasqdiskylnw |
| CAR6 - | | yqqkpgqaprlliyhtsrlhsgiparfsgsgsgtdytltisslqpedfavyfcqqg |
| Full - aa | | ntlpytfgqgtkleikggggsggggsggggsggggsqvqlqesgpglvkpsetlsl |
| | | tctvsgvslpdygvswirqppgkglewigviwgsettyygsslksrvtiskdnskn |
| | | qvslklssvtaadtavyycakhyyyggsyamdywgqgtlvtvsstttpaprpptpa |
| | | ptiasqplslrpeacrpaaggavhtrgldfacdiyiwaplagtcgvlllslvitly |
| | | ckrgrkkllyifkqpfmrpvqttqeedgcscrfpeeeeggcelrvkfsrsadapay |
| | | kqgqnqlynelnlgrreeydvldkrrgrdpemggkprrknpqeglynelqkdkmae |
| | | ayseigmkgerrrgkghdglyqglstatkdtydalhmqalppr |

CAR7

| | | |
|---|---|---|
| CAR7 scFv | 7 | qvqlqesgpglvkpsetlsltctvsgvslpdygvswirqppgkglewigviwgset |
| domain | | tyyssslksrvtiskdnsknqvslklssvtaadtavyycakhyyyggsyamdywgq |
| | | gtlvtvssggggsggggsggggsggggseivmtqspatlslspgeratlscrasqd |
| | | iskylnwyqqkpgqaprlliyhtsrlhsgiparfsgsgsgtdytltisslqpedfa |
| | | vyfcqqgntlpytfgqgtkleik |
| 100796 | 67 | atggcactgcctgtcactgccctcctgctgcctctggccctccttctgcatgccgc |
| CAR7 - | | caggccccaagtccagctgcaagagtcaggacccggactggtgaagccgtctgaga |
| Soluble | | ctctctcactgacttgtaccgtcagcggcgtgtccctccccgactacggagtgtca |
| scFv - nt | | tggatccgccaacctcccgggaaagggcttgaatggattggtgtcatctggggttc |
| | | tgaaaccacctactactcatcttccctgaagtccagggtgaccatcagcaaggata |
| | | attccaagaaccaggtcagccttaagctgtcatctgtgaccgctgctgacaccgcc |
| | | gtgtattactgcgccaagcactactattacggaggaagctacgctatggactattg |
| | | gggacagggcactctcgtgactgtgagcagcggcggtggagggtctggaggtggag |
| | | gatccggtggtggtgggtcaggcggaggagggagcgagattgtgatgactcagtca |
| | | ccagccaccctttctctttcacccggcgagagagcaaccctgagctgtagagccag |
| | | ccaggacatttctaagtacctcaactggtatcagcaaaaaccggggcaggcccctc |
| | | gcctcctgatctaccatacctcacgccttcactctggtatccccgctcggtttagc |
| | | ggatcaggatctggtaccgactacactctgaccatttccagcctgcagccagaaga |
| | | tttcgcagtgtatttctgccagcagggcaatacccttccttacaccttcggtcagg |
| | | gaaccaagctcgaaatcaagcaccatcaccatcatcaccaccat |
| 100796 | 79 | MALPVTALLLPLALLLHAARPqvqlqesgpglvkpsetlsltctvsgvslpdygvs |
| CAR7 - | | wirqppgkglewigviwgsettyyssslksrvtiskdnsknqvslklssvtaadta |
| Soluble | | vyycakhyyyggsyamdywgqgtlvtvssggggsggggsggggsggggseivmtqs |
| scFv - aa | | patlslspgeratlscrasqdiskylnwyqqkpgqaprlliyhtsrlhsgiparfs |
| | | gsgsgtdytltisslqpedfavyfcqqgntlpytfgqgtkleikhhhhhhhh |
| 104881 | 91 | atggctctgcccgtgaccgcactcctcctgccactggctctgctgcttcacgccgc |
| CAR 7 | | tcgcccacaagtccagcttcaagaatcagggcctggtctggtgaagccatctgaga |
| Full - nt | | ctctgtccctcacttgcaccgtgagcggagtgtccctcccagactacggagtgagc |
| | | tggattagacagcctcccggaaagggactggagtggatcggagtgatttggggtag |
| | | cgaaaccacttactattcatcttccctgaagtcacgggtcaccatttcaaaggata |
| | | actcaaagaatcaagtgagcctcaagctctcatcagtcaccgccgctgacaccgcc |
| | | gtgtattactgtgccaagcattactactatggagggtcctacgccatggactactg |
| | | gggccagggaactctggtcactgtgtcatctggtggaggaggtagcggaggaggcg |
| | | ggagcggtggaggtggctccggaggtggcggaagcgaaatcgtgatgacccagagc |
| | | cctgcaaccctgtccctttctcccggggaacgggctaccctttcttgtcgggcatc |
| | | acaagatatctcaaaatacctcaattggtatcaacagaagccgggacaggccccta |
| | | ggcttcttatctaccacacctctcgcctgcatagcgggattcccgcacgctttagc |
| | | gggtctggaagcgggaccgactacactctgaccatctcatctctccagcccgagga |
| | | cttcgccgtctacttctgccagcagggtaacaccctgccgtacaccttcggccagg |
| | | gcaccaagcttgagatcaaaaccactactcccgctccaaggccacccacccctgcc |
| | | ccgaccatcgcctctcagccgctttccctgcgtccggaggcatgtagacccgcagc |
| | | tggtggggccgtgcatacccggggtcttgacttcgcctgcgatatctacatttggg |
| | | cccctctggctggtacttgcggggtcctgctgctttcactcgtgatcactctttac |
| | | tgtaagcgcggtcggaagaagctgctgtacatctttaagcaacccttcatgaggcc |
| | | tgtgcagactactcaagaggaggacggctgttcatgccggttcccagaggaggagg |
| | | aaggcggctgcgaactgcgcgtgaaattcagccgcagcgcagatgctccagcctac |
| | | aagcaggggcagaaccagctctacaacgaactcaatcttggtcggagagaggagta |
| | | cgacgtgctggacaagcggagaggacgggacccagaaatgggcgggaagccgcgca |
| | | gaaagaatccccaagagggcctgtacaacgagctccaaaaggataagatggcagaa |
| | | gcctatagcgagattggtatgaaaggggaacgcagaagaggcaaaggccacgacgg |
| | | actgtaccagggactcagcaccgccaccaaggacacctatgacgctcttcacatgc |
| | | aggccctgccgcctcgg |
| 104881 | 37 | MALPVTALLLPLALLLHAARPqvqlqesgpglvkpsetlsltctvsgvslpdygvs |
| CAR 7 | | wirqppgkglewigviwgsettyyssslksrvtiskdnsknqvslklssvtaadta |
| Full - aa | | vyycakhyyyggsyamdywgqgtlvtvssggggsggggsggggsggggseivmtqs |
| | | patlslspgeratlscrasgdiskylnwyqqkpgqaprlliyhtsrlhsgiparfs |
| | | gsgsgtdytltisslqpedfavyfcqqgntlpytfgqgtkleiktttpaprpptpa |
| | | ptiasqplslrpeacrpaaggavhtrgldfacdiyiwaplagtcgvlllslvitly |
| | | ckrgrkkllyifkqpfmrpvqttqeedgcscrfpeeeeggcelrvkfsrsadapay |
| | | kqgqnqlynelnlgrreeydvldkrrgrdpemggkprrknpqeglynelqkdkmae |
| | | ayseigmkgerrrgkghdglyqglstatkdtydalhmqalppr |

CAR8

| | | |
|---|---|---|
| CAR8 scFv | 8 | qvqlqesgpglvkpsetlsltctvsgvslpdygvswirqppgkglewigviwgset |
| domain | | tyyqsslksrvtiskdnsknqvslklssvtaadtavyycakhyyyggsyamdywgq |
| | | gtlvtvssggggsggggsggggsggggseivmtqspatlslspgeratlscrasqd |
| | | iskylnwyqqkpgqaprlliyhtsrlhsgiparfsgsgsgtdytltisslqpedfa |
| | | vyfcqqgntlpytfgqgtkleik |
| 100798 | 68 | atggcactgcctgtcactgccctcctgctgcctctggccctccttctgcatgccgc |
| CAR8 - | | caggccccaagtccagctgcaagagtcaggacccggactggtgaagccgtctgaga |
| Soluble | | ctctctcactgacttgtaccgtcagcggcgtgtccctccccgactacggagtgtca |
| scFv - nt | | tggatccgccaacctcccgggaaagggcttgaatggattggtgtcatctggggttc |
| | | tgaaaccacctactaccagtcttccctgaagtccagggtgaccatcagcaaggata |
| | | attccaagaaccaggtcagccttaagctgtcatctgtgaccgctgctgacaccgcc |
| | | gtgtattactgcgccaagcactactattacggaggaagctacgctatggactattg |
| | | gggacagggcactctcgtgactgtgagcagcggcggtggagggtctggaggtggag |
| | | gatccggtggtggtgggtcaggcggaggagggagcgagattgtgatgactcagtca |
| | | ccagccaccctttctctttcacccggcgagagagcaaccctgagctgtagagccag |
| | | ccaggacatttctaagtacctcaactggtatcagcaaaaaccggggcaggcccctc |
| | | gcctcctgatctaccatacctcacgccttcactctggtatccccgctcggtttagc |
| | | ggatcaggatctggtaccgactacactctgaccatttccagcctgcagccagaaga |
| | | tttcgcagtgtatttctgccagcagggcaatacccttccttacaccttcggtcagg |
| | | gaaccaagctcgaaatcaagcaccatcaccatcatcatcaccac |
| 100798 | 80 | MALPVTALLLPLALLLHAARPqvqlqesgpglvkpsetlsltctvsgvslpdygvs |
| CAR8 - | | wirqppgkglewigviwgsettyyqsslksrvtiskdnsknqvslklssvtaadta |
| Soluble | | vyycakhyyyggsyamdywgqgtlvtvssggggsggggsggggsggggseivmtqs |
| scFv - aa | | patlslspgeratlscrasqdiskylnwyqqkpgqaprlliyhtsrlhsgiparfs |
| | | gsgsgtdytltisslqpedfavyfcqqgntlpytfgqgtkleikhhhhhhhh |
| 104882 | 92 | atggctctgcccgtgaccgcactcctcctgccactggctctgctgcttcacgccgc |
| CAR 8 - | | tcgcccacaagtccagcttcaagaatcagggcctggtctggtgaagccatctgaga |
| Full - nt | | ctctgtccctcacttgcaccgtgagcggagtgtccctcccagactacggagtgagc |
| | | tggattagacagcctcccggaaagggactggagtggatcggagtgatttggggtag |
| | | cgaaaccacttactatcaatcttccctgaagtcacgggtcaccatttcaaaggata |
| | | actcaaagaatcaagtgagcctcaagctctcatcagtcaccgccgctgacaccgcc |
| | | gtgtattactgtgccaagcattactactatggagggtcctacgccatggactactg |
| | | gggccagggaactctggtcactgtgtcatctggtggaggaggtagcggaggaggcg |
| | | ggagcggtggaggtggctccggaggcggtgggtcagaaatcgtgatgacccagagc |
| | | cctgcaaccctgtccctttctcccggggaacgggctaccctttcttgtcgggcatc |
| | | acaagatatctcaaaatacctcaattggtatcaacagaagccgggacaggccccta |
| | | ggcttcttatctaccacacctctcgcctgcatagcgggattcccgcacgctttagc |
| | | gggtctggaagcgggaccgactacactctgaccatctcatctctccagcccgagga |
| | | cttcgccgtctacttctgccagcagggtaacaccctgccgtacaccttcggccagg |
| | | gcaccaagcttgagatcaaaaccactactcccgctccaaggccacccacccctgcc |
| | | ccgaccatcgcctctcagccgctttccctgcgtccggaggcatgtagacccgcagc |
| | | tggtggggccgtgcatacccggggtcttgacttcgcctgcgatatctacatttggg |
| | | cccctctggctggtacttgcggggtcctgctgctttcactcgtgatcactctttac |
| | | tgtaagcgcggtcggaagaagctgctgtacatctttaagcaacccttcatgaggcc |
| | | tgtgcagactactcaagaggaggacggctgttcatgccggttcccagaggaggagg |
| | | aaggcggctgcgaactgcgcgtgaaattcagccgcagcgcagatgctccagcctac |
| | | aagcaggggcagaaccagctctacaacgaactcaatcttggtcggagagaggagta |
| | | cgacgtgctggacaagcggagaggacgggacccagaaatgggcgggaagccgcgca |
| | | gaaagaatccccaagagggcctgtacaacgagctccaaaaggataagatggcagaa |
| | | gcctatagcgagattggtatgaaaggggaacgcagaagaggcaaaggccacgacgg |
| | | actgtaccagggactcagcaccgccaccaaggacacctatgacgctcttcacatgc |
| | | aggccctgccgcctcgg |
| 104882 | 38 | MALPVTALLLPLALLLHAARPqvqlqesgpglvkpsetlsltctvsgvslpdygvs |
| CAR 8 - | | wirqppgkglewigviwgsettyyqsslksrvtiskdnsknqvslklssvtaadta |
| Full - aa | | vyycakhyyyggsyamdywgqgtlvtvssggggsggggsggggsggggseivmtqs |
| | | patlslspgeratlscrasqdiskylnwyqqkpgqaprlliyhtsrlhsgiparfs |
| | | gsgsgtdytltisslqpedfavyfcqqgntlpytfgqgtkleiktttpaprpptpa |
| | | ptiasqplslrpeacrpaaggavhtrgldfacdiyiwaplagtcgvlllslvitly |
| | | ckrgrkkllyifkqpfmrpvqttqeedgcscrfpeeeeggcelrvkfsrsadapay |
| | | kqgqnqlynelnlgrreeydvldkrrgrdpemggkprrknpqeglynelqkdkmae |
| | | ayseigmkgerrrgkghdglyqglstatkdtydalhmqalppr |

CAR9

| | | |
|---|---|---|
| CAR9 scFv | 9 | eivmtqspatlslspgeratlscrasqdiskylnwyqqkpgqaprlliyhtsrlhs |
| domain | | giparfsgsgsgtdytltisslqpedfavyfcqqgntlpytfgqgtkleikggggs |
| | | ggggsggggsggggsqvqlqesgpglvkpsetlsltctvsgvslpdygvswirqpp |
| | | gkglewigviwgsettyynsslksrvtiskdnsknqvslklssvtaadtavyycak |
| | | hyyyggsyamdywgqgtlvtvss |
| 99789 | 69 | atggccctcccagtgaccgctctgctgctgcctctcgcacttcttctccatgccgc |
| CAR9 - | | tcggcctgagatcgtcatgacccaaagccccgctaccctgtccctgtcacccggcg |
| Soluble | | agagggcaaccctttcatgcagggccagccaggacatttctaagtacctcaactgg |
| scFv - nt | | tatcagcagaagccagggcaggctcctcgcctgctgatctaccacaccagccgcct |
| | | ccacagcggtatccccgccagattttccgggagcgggtctggaaccgactacaccc |
| | | tcaccatctcttctctgcagcccgaggatttcgccgtctatttctgccagcagggg |
| | | aatactctgccgtacaccttcggtcaaggtaccaagctggaaatcaagggaggcgg |
| | | aggatcaggcggtggcggaagcggaggaggtggctccggaggaggaggttcccaag |
| | | tgcagcttcaagaatcaggacccggacttgtgaagccatcagaaaccctctccctg |
| | | acttgtaccgtgtccggtgtgagcctccccgactacggagtctcttggattcgcca |
| | | gcctccggggaagggtcttgaatggattggggtgatttggggatcagagactactt |
| | | actacaattcatcacttaagtcacgggtcaccatcagcaaagataatagcaagaac |
| | | caagtgtcacttaagctgtcatctgtgaccgccgctgacaccgccgtgtactattg |
| | | tgccaaacattactattacggagggtcttatgctatggactactggggacagggga |
| | | ccctggtgactgtctctagccatcaccatcaccaccatcatcac |
| 99789 | 81 | MALPVTALLLPLALLLHAARPeivmtqspatlslspgeratlscrasqdiskylnw |
| CAR9 - | | yqqkpgqaprlliyhtsrlhsgiparfsgsgsgtdytltisslqpedfavyfcqqg |
| Soluble | | ntlpytfgqgtkleikggggsggggsggggsggggsqvqlqesgpglvkpsetlsl |
| scFv - aa | | tctvsgvslpdygvswirqppgkglewigviwgsettyynsslksrvtiskdnskn |
| | | qvslklssvtaadtavyycakhyyyggsyamdywgqgtlvtvsshhhhhhhh |
| 105974 | 93 | atggccctccctgtcaccgccctgctgcttccgctggctcttctgctccacgccgc |
| CAR 9 - | | tcggcccgaaattgtgatgacccagtcacccgccactcttagcctttcacccggtg |
| Full - nt | | agcgcgcaaccctgtcttgcagagcctcccaagacatctcaaaataccttaattgg |
| | | tatcaacagaagcccggacaggctcctcgccttctgatctaccacaccagccggct |
| | | ccattctggaatccctgccaggttcagcggtagcggatctgggaccgactacaccc |
| | | tcactatcagctcactgcagccagaggacttcgctgtctatttctgtcagcaaggg |
| | | aacaccctgccctacacctttggacagggcaccaagctcgagattaaaggtggagg |
| | | tggcagcggaggaggtgggtccggcggtggaggaagcggaggcggtgggagccagg |
| | | tccaactccaagaaagcggaccgggtcttgtgaagccatcagaaactctttcactg |
| | | acttgtactgtgagcggagtgtctctccccgattacggggtgtcttggatcagaca |
| | | gccaccggggaagggtctggaatggattggagtgatttggggctctgagactactt |
| | | actacaactcatccctcaagtcacgcgtcaccatctcaaaggacaactctaagaat |
| | | caggtgtcactgaaactgtcatctgtgaccgcagccgacaccgccgtgtactattg |
| | | cgctaagcattactattatggcgggagctacgcaatggattactggggacagggta |
| | | ctctggtcaccgtgtccagcaccactaccccagcaccgaggccacccaccccggct |
| | | cctaccatcgcctcccagcctctgtccctgcgtccggaggcatgtagacccgcagc |
| | | tggtggggccgtgcatacccggggtcttgacttcgcctgcgatatctacatttggg |
| | | cccctctggctggtacttgcggggtcctgctgctttcactcgtgatcactctttac |
| | | tgtaagcgcggtcggaagaagctgctgtacatctttaagcaacccttcatgaggcc |
| | | tgtgcagactactcaagaggaggacggctgttcatgccggttcccagaggaggagg |
| | | aaggcggctgcgaactgcgcgtgaaattcagccgcagcgcagatgctccagcctac |
| | | aagcaggggcagaaccagctctacaacgaactcaatcttggtcggagagaggagta |
| | | cgacgtgctggacaagcggagaggacgggacccagaaatgggcgggaagccgcgca |
| | | gaaagaatccccaagagggcctgtacaacgagctccaaaaggataagatggcagaa |
| | | gcctatagcgagattggtatgaaaggggaacgcagaagaggcaaaggccacgacgg |
| | | actgtaccagggactcagcaccgccaccaaggacacctatgacgctcttcacatgc |
| | | aggccctgccgcctcgg |
| 105974 | 39 | MALPVTALLLPLALLLHAARPeivmtqspatlslspgeratlscrasgdiskylnw |
| CAR 9 - | | yqqkpgqaprlliyhtsrlhsgiparfsgsgsgtdytltisslqpedfavyfcqqg |
| Full - aa | | ntlpytfgqgtkleikggggsggggsggggsggggsqvqlqesgpglvkpsetlsl |
| | | tctvsgvslpdygvswirqppgkglewigviwgsettyynsslksrvtiskdnskn |
| | | qvslklssvtaadtavyycakhyyyggsyamdywgqgtlvtvsstttpaprpptpa |
| | | ptiasqplslrpeacrpaaggavhtrgldfacdiyiwaplagtcgvlllslvitly |
| | | ckrgrkkllyifkqpfmrpvqttqeedgcscrfpeeeeggcelrvkfsrsadapay |
| | | kqgqnqlynelnlgrreeydvldkrrgrdpemggkprrknpqeglynelqkdkmae |
| | | ayseigmkgerrrgkghdglyqglstatkdtydalhmqalppr |

CAR10

| | | |
|---|---|---|
| CAR10 | 10 | qvqlqesgpglvkpsetlsltctvsgvslpdygvswirqppgkglewigviwgset |
| scFv | | tyynsslksrvtiskdnsknqvslklssvtaadtavyycakhyyyggsyamdywgq |
| domain | | gtlvtvssggggsggggsggggsggggseivmtqspatlslspgeratlscrasqd |
| | | iskylnwyqqkpgqaprlliyhtsrlhsgiparfsgsgsgtdytltisslqpedfa |
| | | vyfcqqgntlpytfgqgtkleik |
| 100796 | 70 | atggcactgcctgtcactgccctcctgctgcctctggccctccttctgcatgccgc |
| CAR10 - | | caggccccaagtccagctgcaagagtcaggacccggactggtgaagccgtctgaga |
| Soluble | | ctctctcactgacttgtaccgtcagcggcgtgtccctccccgactacggagtgtca |
| scFv - nt | | tggatccgccaacctcccgggaaagggcttgaatggattggtgtcatctggggttc |
| | | tgaaaccacctactacaactcttccctgaagtccagggtgaccatcagcaaggata |
| | | attccaagaaccaggtcagccttaagctgtcatctgtgaccgctgctgacaccgcc |
| | | gtgtattactgcgccaagcactactattacggaggaagctacgctatggactattg |
| | | gggacagggcactctcgtgactgtgagcagcggcggtggagggtctggaggtggag |
| | | gatccggtggtggtgggtcaggcggaggagggagcgagattgtgatgactcagtca |
| | | ccagccaccctttctctttcacccggcgagagagcaaccctgagctgtagagccag |
| | | ccaggacatttctaagtacctcaactggtatcagcaaaaaccggggcaggcccctc |
| | | gcctcctgatctaccatacctcacgccttcactctggtatccccgctcggtttagc |
| | | ggatcaggatctggtaccgactacactctgaccatttccagcctgcagccagaaga |
| | | tttcgcagtgtatttctgccagcagggcaatacccttccttacaccttcggtcagg |
| | | gaaccaagctcgaaatcaagcaccatcaccatcatcaccaccat |
| 100796 | 82 | MALPVTALLLPLALLLHAARPqvqlqesgpglvkpsetlsltctvsgvslpdygvs |
| CAR10 - | | wirqppgkglewigviwgsettyynsslksrvtiskdnsknqvslklssvtaadta |
| Soluble | | vyycakhyyyggsyamdywgqgtlvtvssggggsggggsggggsggggseivmtqs |
| scFv-aa | | patlslspgeratlscrasqdiskylnwyqqkpgqaprlliyhtsrlhsgiparfs |
| | | gsgsgtdytltisslqpedfavyfcqqgntlpytfgqgtkleikhhhhhhhh |
| 105975 | 94 | atggccctccctgtcaccgccctgctgcttccgctggctcttctgctccacgccgc |
| CAR 10 | | tcggcccgaaattgtgatgacccagtcacccgccactcttagcctttcacccggtg |
| Full - nt | | agcgcgcaaccctgtcttgcagagcctcccaagacatctcaaaataccttaattgg |
| | | tatcaacagaagcccggacaggctcctcgccttctgatctaccacaccagccggct |
| | | ccattctggaatccctgccaggttcagcggtagcggatctgggaccgactacaccc |
| | | tcactatcagctcactgcagccagaggacttcgctgtctatttctgtcagcaaggg |
| | | aacaccctgccctacacctttggacagggcaccaagctcgagattaaaggtggagg |
| | | tggcagcggaggaggtgggtccggcggtggaggaagcggaggcggtgggagccagg |
| | | tccaactccaagaaagcggaccgggtcttgtgaagccatcagaaactctttcactg |
| | | acttgtactgtgagcggagtgtctctccccgattacggggtgtcttggatcagaca |
| | | gccaccggggaagggtctggaatggattggagtgatttggggctctgagactactt |
| | | actacaactcatccctcaagtcacgcgtcaccatctcaaaggacaactctaagaat |
| | | caggtgtcactgaaactgtcatctgtgaccgcagccgacaccgccgtgtactattg |
| | | cgctaagcattactattatggcgggagctacgcaatggattactggggacagggta |
| | | ctctggtcaccgtgtccagcaccactaccccagcaccgaggccacccaccccggct |
| | | cctaccatcgcctcccagcctctgtccctgcgtccggaggcatgtagacccgcagc |
| | | tggtggggccgtgcatacccggggtcttgacttcgcctgcgatatctacatttggg |
| | | cccctctggctggtacttgcggggtcctgctgctttcactcgtgatcactctttac |
| | | tgtaagcgcggtcggaagaagctgctgtacatctttaagcaacccttcatgaggcc |
| | | tgtgcagactactcaagaggaggacggctgttcatgccggttcccagaggaggagg |
| | | aaggcggctgcgaactgcgcgtgaaattcagccgcagcgcagatgctccagcctac |
| | | aagcaggggcagaaccagctctacaacgaactcaatcttggtcggagagaggagta |
| | | cgacgtgctggacaagcggagaggacgggacccagaaatgggcgggaagccgcgca |
| | | gaaagaatccccaagagggcctgtacaacgagctccaaaaggataagatggcagaa |
| | | gcctatagcgagattggtatgaaaggggaacgcagaagaggcaaaggccacgacgg |
| | | actgtaccagggactcagcaccgccaccaaggacacctatgacgctcttcacatgc |
| | | aggccctgccgcctcgg |
| 105975 | 40 | MALPVTALLLPLALLLHAARPEIVMTQSPATLSLSPGERATLSCRASQDISKYLNW |
| CAR 10 | | YQQKPGQAPRLLIYHTSRLHSGIPARFSGSGSGTDYTLTISSLQPEDFAVYFCQQG |
| Full - aa | | NTLPYTFGQGTKLEIKGGGGSGGGGSGGGGSGGGGSQVQLQESGPGLVKPSETLSL |
| | | TCTVSGVSLPDYGVSWIRQPPGKGLEWIGVIWGSETTYYNSSLKSRVTISKDNSKN |
| | | QVSLKLSSVTAADTAVYYCAKHYYYGGSYAMDYWGQGTLVTVSSTTTPAPRPPTPA |
| | | PTIASQPLSLRPEACRPAAGGAVHTRGLDFACDIYIWAPLAGTCGVLLLSLVITLY |
| | | CKRGRKKLLYIFKQPFMRPVQTTQEEDGCSCRFPEEEEGGCELRVKFSRSADAPAY |
| | | KQGQNQLYNELNLGRREEYDVLDKRRGRDPEMGGKPRRKNPQEGLYNELQKDKMAE |
| | | AYSEIGMKGERRRGKGHDGLYQGLSTATKDTYDALHMQALPPR |

CAR11

| | | |
|---|---|---|
| CAR11 | 11 | eivmtqspatlslspgeratlscrasqdiskylnwyqqkpgqaprlliyhtsrlhs |
| scFv | | giparfsgsgsgtdytltisslqpedfavyfcqqgntlpytfgqgtkleikggggs |
| domain | | ggggsggggsqvqlqesgpglvkpsetlsltctvsgvslpdygvswirqppgkgle |
| | | wigviwgsettyynsslksrvtiskdnsknqvslklssvtaadtavyycakhyyyg |
| | | gsyamdywgqgtlvtvss |
| 103101 | 71 | Atggccctccctgtcaccgccctgctgcttccgctggctcttctgctccacgccgc |
| CAR11 - | | tcggcccgaaattgtgatgacccagtcacccgccactcttagcctttcacccggtg |
| Soluble | | agcgcgcaaccctgtcttgcagagcctcccaagacatctcaaaataccttaattgg |
| scFv - nt | | tatcaacagaagcccggacaggctcctcgccttctgatctaccacaccagccggct |
| | | ccattctggaatccctgccaggttcagcggtagcggatctgggaccgactacaccc |
| | | tcactatcagctcactgcagccagaggacttcgctgtctatttctgtcagcaaggg |
| | | aacaccctgccctacacctttggacagggcaccaagctcgagattaaaggtggagg |
| | | tggcagcggaggaggtgggtccggcggtggaggaagccaggtccaactccaagaaa |
| | | gcggaccgggtcttgtgaagccatcagaaactctttcactgacttgtactgtgagc |
| | | ggagtgtctctccccgattacggggtgtcttggatcagacagccaccggggaaggg |
| | | tctggaatggattggagtgatttggggctctgagactacttactacaattcatccc |
| | | tcaagtcacgcgtcaccatctcaaaggacaactctaagaatcaggtgtcactgaaa |
| | | ctgtcatctgtgaccgcagccgacaccgccgtgtactattgcgctaagcattacta |
| | | ttatggcgggagctacgcaatggattactggggacagggtactctggtcaccgtgt |
| | | ccagccaccaccatcatcaccatcaccat |
| 103101 | 83 | MALPVTALLLPLALLLHAARPeivmtqspatlslspgeratlscrasqdiskylnw |
| CAR11 - | | yqqkpgqaprlliyhtsrlhsgiparfsgsgsgtdytltisslqpedfavyfcqqg |
| Soluble | | ntlpytfgqgtkleikggggsggggsggggsqvqlqesgpglvkpsetlsltctvs |
| scFv - aa | | gvslpdygvswirqppgkglewigviwgsettyynsslksrvtiskdnsknqvslk |
| | | lssvtaadtavyycakhyyyggsyamdywgqgtlvtvsshhhhhhhh |
| 105976 | 95 | atggctctgcccgtgaccgcactcctcctgccactggctctgctgcttcacgccgc |
| CAR 11 | | tcgcccacaagtccagcttcaagaatcagggcctggtctggtgaagccatctgaga |
| Full - nt | | ctctgtccctcacttgcaccgtgagcggagtgtccctcccagactacggagtgagc |
| | | tggattagacagcctcccggaaagggactggagtggatcggagtgatttggggtag |
| | | cgaaaccacttactataactcttccctgaagtcacgggtcaccatttcaaaggata |
| | | actcaaagaatcaagtgagcctcaagctctcatcagtcaccgccgctgacaccgcc |
| | | gtgtattactgtgccaagcattactactatggagggtcctacgccatggactactg |
| | | gggccagggaactctggtcactgtgtcatctggtggaggaggtagcggaggaggcg |
| | | ggagcggtggaggtggctccggaggtggcggaagcgaaatcgtgatgacccagagc |
| | | cctgcaaccctgtccctttctcccggggaacgggctaccctttcttgtcgggcatc |
| | | acaagatatctcaaaatacctcaattggtatcaacagaagccgggacaggccccta |
| | | ggcttcttatctaccacacctctcgcctgcatagcgggattcccgcacgctttagc |
| | | gggtctggaagcgggaccgactacactctgaccatctcatctctccagcccgagga |
| | | cttcgccgtctacttctgccagcagggtaacaccctgccgtacaccttcggccagg |
| | | gcaccaagcttgagatcaaaaccactactcccgctccaaggccacccacccctgcc |
| | | ccgaccatcgcctctcagccgctttccctgcgtccggaggcatgtagacccgcagc |
| | | tggtggggccgtgcatacccggggtcttgacttcgcctgcgatatctacatttggg |
| | | cccctctggctggtacttgcggggtcctgctgctttcactcgtgatcactctttac |
| | | tgtaagcgcggtcggaagaagctgctgtacatctttaagcaacccttcatgaggcc |
| | | tgtgcagactactcaagaggaggacggctgttcatgccggttcccagaggaggagg |
| | | aaggcggctgcgaactgcgcgtgaaattcagccgcagcgcagatgctccagcctac |
| | | aagcaggggcagaaccagctctacaacgaactcaatcttggtcggagagaggagta |
| | | cgacgtgctggacaagcggagaggacgggacccagaaatgggcgggaagccgcgca |
| | | gaaagaatccccaagagggcctgtacaacgagctccaaaaggataagatggcagaa |
| | | gcctatagcgagattggtatgaaaggggaacgcagaagaggcaaaggccacgacgg |
| | | actgtaccagggactcagcaccgccaccaaggacacctatgacgctcttcacatgc |
| | | aggccctgccgcctcgg |
| 105976 | 41 | MALPVTALLLPLALLLHAARPQVQLQESGPGLVKPSETLSLTCTVSGVSLPDYGVS |
| CAR 11 | | WIRQPPGKGLEWIGVIWGSETTYYNSSLKSRVTISKDNSKNQVSLKLSSVTAADTA |
| Full - aa | | VYYCAKHYYYGGSYAMDYWGQGTLVTVSSGGGGSGGGGSGGGGSGGGGSEIVMTQS |
| | | PATLSLSPGERATLSCRASQDISKYLNWYQQKPGQAPRLLIYHTSRLHSGIPARFS |
| | | GSGSGTDYTLTISSLQPEDFAVYFCQQGNTLPYTFGQGTKLEIKTTTPAPRPPTPA |
| | | PTIASQPLSLRPEACRPAAGGAVHTRGLDFACDIYIWAPLAGTCGVLLLSLVITLY |
| | | CKRGRKKLLYIFKQPFMRPVQTTQEEDGCSCRFPEEEEGGCELRVKFSRSADAPAY |
| | | KQGQNQLYNELNLGRREEYDVLDKRRGRDPEMGGKPRRKNPQEGLYNELQKDKMAE |
| | | AYSEIGMKGERRRGKGHDGLYQGLSTATKDTYDALHMQALPPR |

CAR12

| | | |
|---|---|---|
| CAR12 | 12 | qvqlqesgpglvkpsetlsltctvsgvslpdygvswirqppgkglewigviwgset |
| scFv | | tyynsslksrvtiskdnsknqvslklssvtaadtavyycakhyyyggsyamdywgq |
| domain | | gtlvtvssggggsggggsggggseivmtqspatlslspgeratlscrasqdiskyl |
| | | nwyqqkpgqaprlliyhtsrlhsgiparfsgsgsgtdytltisslqpedfavyfcq |
| | | qgntlpytfgqgtkleik |
| 103104 | 72 | atggctctgcccgtgaccgcactcctcctgccactggctctgctgcttcacgccgc |
| CAR12 - | | tcgcccacaagtccagcttcaagaatcagggcctggtctggtgaagccatctgaga |
| Soluble | | ctctgtccctcacttgcaccgtgagcggagtgtccctcccagactacggagtgagc |
| scFv - nt | | tggattagacagcctcccggaaagggactggagtggatcggagtgatttggggtag |
| | | cgaaaccacttactataactcttccctgaagtcacgggtcaccatttcaaaggata |
| | | actcaaagaatcaagtgagcctcaagctctcatcagtcaccgccgctgacaccgcc |
| | | gtgtattactgtgccaagcattactactatggagggtcctacgccatggactactg |
| | | gggccagggaactctggtcactgtgtcatctggtggaggaggtagcggaggaggcg |
| | | ggagcggtggaggtggctccgaaatcgtgatgacccagagccctgcaaccctgtcc |
| | | ctttctcccggggaacgggctaccctttcttgtcgggcatcacaagatatctcaaa |
| | | atacctcaattggtatcaacagaagccgggacaggcccctaggcttcttatctacc |
| | | acacctctcgcctgcatagcgggattcccgcacgctttagcgggtctggaagcggg |
| | | accgactacactctgaccatctcatctctccagcccgaggacttcgccgtctactt |
| | | ctgccagcagggtaacaccctgccgtacaccttcggccagggcaccaagcttgaga |
| | | tcaaacatcaccaccatcatcaccatcac |
| 103104 | 84 | MALPVTALLLPLALLLHAARPqvqlqesgpglvkpsetlsltctvsgvslpdygvs |
| CAR12 - | | wirqppgkglewigviwgsettyynsslksrvtiskdnsknqvslklssvtaadta |
| Soluble | | vyycakhyyyggsyamdywgqgtlvtvssggggsggggsggggseivmtqspatls |
| scFv -aa | | lspgeratlscrasqdiskylnwyqqkpgqaprlliyhtsrlhsgiparfsgsgsg |
| | | tdytltisslqpedfavyfcqqgntlpytfgqgtkleikhhhhhhhh |
| 105977 | 96 | atggccctccctgtcaccgccctgctgcttccgctggctcttctgctccacgccgc |
| CAR 12 - | | tcggcccgaaattgtgatgacccagtcacccgccactcttagcctttcacccggtg |
| Full - nt | | agcgcgcaaccctgtcttgcagagcctcccaagacatctcaaaataccttaattgg |
| | | tatcaacagaagcccggacaggctcctcgccttctgatctaccacaccagccggct |
| | | ccattctggaatccctgccaggttcagcggtagcggatctgggaccgactacaccc |
| | | tcactatcagctcactgcagccagaggacttcgctgtctatttctgtcagcaaggg |
| | | aacaccctgccctacacctttggacagggcaccaagctcgagattaaaggtggagg |
| | | tggcagcggaggaggtgggtccggcggtggaggaagccaggtccaactccaagaaa |
| | | gcggaccgggtcttgtgaagccatcagaaactctttcactgacttgtactgtgagc |
| | | ggagtgtctctccccgattacggggtgtcttggatcagacagccaccggggaaggg |
| | | tctggaatggattggagtgatttggggctctgagactacttactacaactcatccc |
| | | tcaagtcacgcgtcaccatctcaaaggacaactctaagaatcaggtgtcactgaaa |
| | | ctgtcatctgtgaccgcagccgacaccgccgtgtactattgcgctaagcattacta |
| | | ttatggcgggagctacgcaatggattactggggacagggtactctggtcaccgtgt |
| | | ccagcaccactaccccagcaccgaggccacccaccccggctcctaccatcgcctcc |
| | | cagcctctgtccctgcgtccggaggcatgtagacccgcagctggtggggccgtgca |
| | | tacccggggtcttgacttcgcctgcgatatctacatttgggcccctctggctggta |
| | | cttgcggggtcctgctgctttcactcgtgatcactctttactgtaagcgcggtcgg |
| | | aagaagctgctgtacatctttaagcaacccttcatgaggcctgtgcagactactca |
| | | agaggaggacggctgttcatgccggttcccagaggaggaggaaggcggctgcgaac |
| | | tgcgcgtgaaattcagccgcagcgcagatgctccagcctacaagcaggggcagaac |
| | | cagctctacaacgaactcaatcttggtcggagagaggagtacgacgtgctggacaa |
| | | gcggagaggacgggacccagaaatgggcgggaagccgcgcagaaagaatccccaag |
| | | agggcctgtacaacgagctccaaaaggataagatggcagaagcctatagcgagatt |
| | | ggtatgaaaggggaacgcagaagaggcaaaggccacgacggactgtaccagggact |
| | | cagcaccgccaccaaggacacctatgacgctcttcacatgcaggccctgccgcctc |
| | | gg |
| 105977 | 42 | MALPVTALLLPLALLLHAARPEIVMTQSPATLSLSPGERATLSCRASQDISKYLNW |
| CAR 12 - | | YQQKPGQAPRLLIYHTSRLHSGIPARFSGSGSGTDYTLTISSLQPEDFAVYFCQQG |
| Full - aa | | NTLPYTFGQGTKLEIKGGGGSGGGGSGGGGSQVQLQESGPGLVKPSETLSLTCTVS |
| | | GVSLPDYGVSWIRQPPGKGLEWIGVIWGSETTYYNSSLKSRVTISKDMSKMQVSLK |
| | | LSSVTAADTAVYYCAKHYYYGGSYAMDYWGQGTLVTVSSTTTPAPRPPTPAPTIAS |
| | | QPLSLRPEACRPAAGGAVHTRGLDFACDIYIWAPLAGTCGVLLLSLVITLYCKRGR |
| | | KKLLYIFKQPFMRPVQTTQEEDGCSCREPEEEEGGCELRVKFSRSADAPAYKQGQN |
| | | QLYNELNLGRREEYDVLDKRRGRDPEMGGKPRRKMPQEGLYNELQKDKMAEAYSEI |
| | | GMKGERRRGKGHDGLYQGLSTATKDTYDALHMQALPPR |

TABLE 3
Murine CD19 CAR Constructs
CTL019

| | | |
|---|---|---|
| CTL019- | 97 | Atggccctgcccgtcaccgctctgctgctgccccttgctctgcttcttcatgcagc |
| Soluble | | aaggccggacatccagatgacccaaaccacctcatccctctctgcctctcttggag |
| scFv-Histag- | | acagggtgaccatttcttgtcgcgccagccaggacatcagcaagtatctgaactgg |
| nt | | tatcagcagaagccggacggaaccgtgaagctcctgatctaccatacctctcgcct |
| | | gcatagcggcgtgccctcacgcttctctggaagcggatcaggaaccgattattctc |
| | | tcactatttcaaatcttgagcaggaagatattgccacctatttctgccagcagggt |
| | | aataccctgccctacaccttcggaggagggaccaagctcgaaatcaccggtggagg |
| | | aggcagcggcggtggagggtctggtggaggtggttctgaggtgaagctgcaagaat |
| | | caggccctggacttgtggccccttcacagtccctgagcgtgacttgcaccgtgtcc |
| | | ggagtctccctgcccgactacggagtgtcatggatcagacaacctccacggaaagg |
| | | actggaatggctcggtgtcatctggggtagcgaaactacttactacaattcagccc |
| | | tcaaaagcaggctgactattatcaaggacaacagcaagtcccaagtctttcttaag |
| | | atgaactcactccagactgacgacaccgcaatctactattgtgctaagcactacta |
| | | ctacggaggatcctacgctatggattactggggacaaggtacttccgtcactgtct |
| | | cttcacaccatcatcaccatcaccatcac |
| CTL019- | 98 | MALPVTALLLPLALLLHAARPdiqmtqttsslsaslgdrvtiscrasqdiskylnw |
| Soluble | | yqqkpdgtvklliyhtsrlhsgvpsrfsgsgsgtdysltisnleqediatyfcqqg |
| scFv-Histag- | | ntlpytfgggtkleitggggsggggsggggsevklqesgpglvapsqslsvtctvs |
| aa | | gvslpdygvswirqpprkglewlgviwgsettyynsalksrltiikdnsksqvflk |
| | | mnslqtddtaiyycakhyyyggsyamdywgqgtsvtvsshhhhhhhh |
| CTL019 | 99 | atggccttaccagtgaccgccttgctcctgccgctggccttgctgctccacgccgc |
| Full-nt | | caggccggacatccagatgacacagactacatcctccctgtctgcctctctgggag |
| | | acagagtcaccatcagttgcagggcaagtcaggacattagtaaatatttaaattgg |
| | | tatcagcagaaaccagatggaactgttaaactcctgatctaccatacatcaagatt |
| | | acactcaggagtcccatcaaggttcagtggcagtgggtctggaacagattattctc |
| | | tcaccattagcaacctggagcaagaagatattgccacttacttttgccaacagggt |
| | | aatacgcttccgtacacgttcggaggggggaccaagctggagatcacaggtggcgg |
| | | tggctcgggcggtggtgggtcgggtggcggcggatctgaggtgaaactgcaggagt |
| | | caggacctggcctggtggcgccctcacagagcctgtccgtcacatgcactgtctca |
| | | ggggtctcattacccgactatggtgtaagctggattcgccagcctccacgaaaggg |
| | | tctggagtggctgggagtaatatggggtagtgaaaccacatactataattcagctc |
| | | tcaaatccagactgaccatcatcaaggacaactccaagagccaagttttcttaaaa |
| | | atgaacagtctgcaaactgatgacacagccatttactactgtgccaaacattatta |
| | | ctacggtggtagctatgctatggactactggggccaaggaacctcagtcaccgtct |
| | | cctcaaccacgacgccagcgccgcgaccaccaacaccggcgcccaccatcgcgtcg |
| | | cagcccctgtccctgcgcccagaggcgtgccggccagcggcggggggcgcagtgca |
| | | cacgagggggctggacttcgcctgtgatatctacatctgggcgcccttggccggga |
| | | cttgtggggtccttctcctgtcactggttatcaccctttactgcaaacggggcaga |
| | | aagaaactcctgtatatattcaaacaaccatttatgagaccagtacaaactactca |
| | | agaggaagatggctgtagctgccgatttccagaagaagaagaaggaggatgtgaac |
| | | tgagagtgaagttcagcaggagcgcagacgcccccgcgtacaagcagggccagaac |
| | | cagctctataacgagctcaatctaggacgaagagaggagtacgatgttttggacaa |
| | | gagacgtggccgggaccctgagatggggggaaagccgagaaggaagaaccctcagg |
| | | aaggcctgtacaatgaactgcagaaagataagatggcggaggcctacagtgagatt |
| | | gggatgaaaggcgagcgccggaggggcaaggggcacgatggcctttaccagggtct |
| | | cagtacagccaccaaggacacctacgacgcccttcacatgcaggccctgccccctc |
| | | gc |
| CTL019 | 58 | MALPVTALLLPLALLLHAARPdiqmtqttsslsaslgdrvtiscrasqdiskylnw |
| Full-aa | | yqqkpdgtvklliyhtsrlhsgvpsrfsgsgsgtdysltisnleqediatyfcqqg |
| | | ntlpytfgggtkleitggggsggggsggggsevklqesgpglvapsqslsvtctvs |
| | | gvslpdygvswirqpprkglewlgviwgsettyynsalksrltiikdnsksqvflk |
| | | mnslqtddtaiyycakhyyyggsyamdywgqgtsvtvsstttpaprpptpaptias |
| | | qplslrpeacrpaaggavhtrgldfacdiyiwaplagtcgvlllslvitlyckrgr |
| | | kkllyifkqpfmrpvqttgeedgcscrfpeeeeggcelrvkfsrsadapaykqgqn |
| | | qlynelnlgrreeydvldkrrgrdpemggkprrknpqeglynelqkdkmaeaysei |
| | | gmkgerrrgkghdglyqglstatkdtydalhmqalppr |
| CTL019 | 59 | Diqmtqttsslsaslgdrvtiscrasqdiskylnwyqqkpdgtvklliyhtsrlhs |
| scFv | | gvpsrfsgsgsgtdysltisnleqediatyfcqqgntlpytfgggtkleitggggs |
| domain | | ggggsggggsevklqesgpglvapsqslsvtctvsgvslpdygvswirqpprkgle |
| | | wlgviwgsettyynsalksrltiikdnsksqvflkmnslqtddtaiyycakhyyyg |
| | | gsyamdywgqgtsvtvss |
| mCAR1 | 109 | QVQLLESGAELVRPGSSVKISCKASGYAFSSYWMNWVKQRPGQGLEWIGQIYPGDG |
| scFv | | DTNYNGKFKGQATLTADKSSSTAYMQLSGLTSEDSAVYSCARKTISSVVDFYFDYW |
| | | GQGTTVTGGGSGGGSGGGSGGGSELVLTQSPKFMSTSVGDRVSVTCKASQNVGTNV |
| | | AWYQQKPGQSPKPLIYSATYRNSGVPDRFTGSGSGTDFTLTITNVQSKDLADYFCQ |
| | | YNRYPYTSFFFTKLEIKRRS |
| mCAR1 | 110 | QVQLLESGAELVRPGSSVKISCKASGYAFSSYWMNWVKQRPGQGLEWIGQIYPGDG |
| Full-aa | | DTNYNGKFKGQATLTADKSSSTAYMQLSGLTSEDSAVYSCARKTISSVVDFYFDYW |
| | | GQGTTVTGGGSGGGSGGGSGGGSELVLTQSPKFMSTSVGDRVSVTCKASQNVGTNV |
| | | AWYQQKPGQSPKPLIYSATYRNSGVPDRFTGSGSGTDFTLTITNVQSKDLADYFCQ |
| | | YNRYPYTSFFFTKLEIKRRSKIEVMYPPPYLDNEKSNGTIIHVKGKHLCPSPLFPG |
| | | PSKPFWVLVVVGGVLACYSLLVTVAFIIFWVRSKRSRLLHSDYMNMTPRRPGPTRK |
| | | HYQPYAPPRDFAAYRSRVKFSRSADAPAYQQGQNQLYNELNLGRREEYDVLDKRRG |
| | | RDPEMGGKPRRKNPQEGLYNELQKDKMAEAYSEIGMKGERRRGKGHDGLYQGLSTA |
| | | TKDTYDALHMQALPPR |
| mCAR2 | 111 | DIQMTQTTSSLSASLGDRVTISCRASQDISKYLNWYQQKPDGTVKLLIYHTSRLHS |
| scFv | | GVPSRFSGSGSGTDYSLTISNLEQEDIATYFCQQGNTLPYTFGGGTKLEITGSTSG |
| | | SGKPGSGEGSTKGEVKLQESGPGLVAPSQSLSVTCTVSGVSLPDYGVSWIRQPPRK |
| | | GLEWLGVIWGSETTYYNSALKSRLTIIKDNSKSQVFLKMNSLQTDDTAIYYCAKHY |
| | | YYGGSYAMDYWGQGTSVTVSSE |
| mCAR2 | 112 | DIQMTQTTSSLSASLGDRVTISCRASQDISKYLNWYQQKPDGTVKLLIYHTSRLHS |
| CAR-aa | | GVPSRFSGSGSGTDYSLTISNLEQEDIATYFCQQGNTLPYTFGGGTKLEITGSTSG |
| | | SGKPGSGEGSTKGEVKLQESGPGLVAPSQSLSVTCTVSGVSLPDYGVSWIRQPPRK |
| | | GLEWLGVIWGSETTYYNSALKSRLTIIKDNSKSQVFLKMNSLQTDDTAIY |
| | | YCAKHYYYGGSYAMDYWGQGTSVTVSSESKYGPPCPPCPMFWVLVVVGGVLACYSL |
| | | LVTVAFIIFWVKRGRKKLLYIFKQPFMRPVQTTQEEDGCSCRFEEEEGGCELRVKF |
| | | SRSADAPAYQQGQNQLYNELNLGRREEYDVLDKRRGRDPEMGGKPRRKNPQEGLYN |
| | | ELQKDKMAEAYSEIGMKGERRRGKGHDGLYQGLSTATKDTYDALHMQALPPRL |
| mCAR2 | 113 | DIQMTQTT SSLSASLGDR VTISCRASQD ISKYLNWYQQ KPDGTVKLLI |
| Full-aa | | YHTSRLHSGV PSRFSGSGSG TDYSLTISNL EQEDIATYFC QQGNTLPYTF |
| | | GGGTKLEITG STSGSGKPGS GEGSTKGEVK LQESGPGLVA PSQSLSVTCT |
| | | VSGVSLPDYG VSWIRQPPRK GLEWLGVIWG SETTYYNSAL KSRLTIIKDN |
| | | SKSQVFLKMN SLQTDDTAIY YCAKHYYYGG SYAMDYWGQG TSVTVSSESK |
| | | YGPPCPPCPM FWVLVVVGGV LACYSLLVTV |
| | | AFIIFWVKRG RKKLLYIFKQ PFMRPVQTTQ EEDGCSCRFE EEEGGCELRV |
| | | KFSRSADAPA YQQGQNQLYN ELNLGRREEY DVLDKRRGRD PEMGGKPRRK |
| | | NPQEGLYNEL QKDKMAEAYS EIGMKGERRR GKGHDGLYQG LSTATKDTYD |
| | | ALHMQALPPR LEGGGEGRGS LLTCGDVEEN PGPRMLLLVT SLLLCELPHP |
| | | AFLLIPRKVC NGIGIGEFKD SLSINATNIK HFKNCTSISG DLHILPVAFR |
| | | GDSFTHTPPL DPQELDILKT VKEITGFLLI QAWPENRTDL HAFENLEIIR |
| | | GRTKQHGQFS LAVVSLNITS LGLRSLKEIS DGDVIISGNK NLCYANTINW |
| | | KKLFGTSGQK TKIISNRGEN SCKATGQVCH ALCSPEGCWG PEPRDCVSCR |
| | | NVSRGRECVD KCNLLEGEPR EFVENSECIQ CHPECLPQAM NITCTGRGPD |
| | | NCIQCAHYID GPHCVKTCPA GVMGENNTLV WKYADAGHVC HLCHPNCTYG |
| | | CTGPGLEGCP TNGPKIPSIA TGMVGALLLL LVVALGIGLF M |
| mCAR3 | 114 | DIQMTQTTSSLSASLGDRVTISCRASQDISKYLNWYQQKPDGTVKLLIYHTSRLHS |
| scFv | | GVPSRFSGSGSGTDYSLTISNLEQEDIATYFCQQGNTLPYTFGGGTKLEITGSTSG |
| | | SGKPGSGEGSTKGEVKLQESGPGLVAPSQSLSVTCTVSGVSLPDYGVSWIRQPPRK |
| | | GLEWLGVIWGSETTYYNSALKSRLTIIKDNSKSQVFLKMNSLQTDDTAIYYCAKHY |
| | | YYGGSYAMDYWGQGTSVTVSS |
| mCAR3 | 115 | DIQMTQTTSSLSASLGDRVTISCRASQDISKYLNWYQQKPDGTVKLLIYHTSRLHS |
| Full-aa | | GVPSRFSGSGSGTDYSLTISNLEQEDIATYFCQQGNTLPYTFGGGTKLEITGSTSG |
| | | SGKPGSGEGSTKGEVKLQESGPGLVAPSQSLSVTCTVSGVSLPDYGVSWIRQPPRK |
| | | GLEWLGVIWGSETTYYNSALKSRLTIIKDNSKSQVFLKMNSLQTDDTAIYYCAKHY |
| | | YYGGSYAMDYWGQGTSVTVSSAAAIEVMYPPPYLDNEKSNGTIIHVKGKHLCPSPL |
| | | FPGPSKPFWVLVVVGGVLACYSLLVTVAFIIFWVRSKRSRLLHSDYMNMTPRRPGP |
| | | TRKHYQPYAPPRDFAAYRSRVKFSRSADAPAYQQGQNQLYNELNLGRREEYDVLDK |
| | | RRGRDPEMGGKPRRKNPQEGLYNELQKDKMAEAYSEIGMKGERRRGKGHDGLYQGL |
| | | STATKDTYDALHMQALPPR |
| SSJ25-C1 | | QVQLLESGAELVRPGSSVKISCKASGYAFSSYWMNWVKQRPGQGLEWIGQIYPGDG |
| VH | | DTNYNGKFKGQATLTADKSSSTAYMQLSGLTSEDSAVYSCARKTISSVVDFYFDYW |
| sequence | | GQGTTVT |
| SSJ25-C1 | | ELVLTQSPKFMSTSVGDRVSVTCKASQNVGTNVAWYQQKPGQSPKPLIYSATYRNS |
| VL | | GVPDRFTGSGSGTDFTLTITNVQSKDLADYFYFCQYNRYPYTSGGGTKLEIKRRS |
| sequence | | |

TABLE 4
Heavy Chain Variable Domain CDRs

| Candidate | FW | HCDR1 | ID | HCDR2 | ID | HCDR3 | ID |
|---|---|---|---|---|---|---|---|
| murine_CART19 | | GVSLPDYGVS | 19 | VIWGSETTYYNSALKS | 20 | HYYYGGSYAMDY | 24 |
| humanized_CART19 a | VH4 | GVSLPDYGVS | 19 | VIWGSETTYYSSSLKS | 21 | HYYYGGSYAMDY | 24 |
| humanized_CART19 b | VH4 | GVSLPDYGVS | 19 | VIWGSETTYYQSSLKS | 22 | HYYYGGSYAMDY | 24 |
| humanized_CART19 c | VH4 | GVSLPDYGVS | 19 | VIWGSETTYYNSSLKS | 23 | HYYYGGSYAMDY | 24 |

TABLE 5
Light Chain Variable Domain CDRs

| Candidate | FW | LCDR1 | ID | LCDR2 | ID | LCDR3 | ID |
|---|---|---|---|---|---|---|---|
| murine_CART19 | | RASQDISKYLN | 25 | HTSRLHS | 26 | QQGNTLPYT | 27 |
| humanized_CART19 a | VK3 | RASQDISKYLN | 25 | HTSRLHS | 26 | QQGNTLPYT | 27 |
| humanized_CART19 b | VK3 | RASQDISKYLN | 25 | HTSRLHS | 26 | QQGNTLPYT | 27 |
| humanized_CART19 c | VK3 | RASQDISKYLN | 25 | HTSRLHS | 26 | QQGNTLPYT | 27 |

[0577] Provided herein are CD19 inhibitors and combination therapies. In some embodiments, the CD19 inhibitor (e.g., a cell therapy, e.g., a CD19-expressing CAR, or an antibody) is administered in combination with a B cell inhibitor, e.g., one or more inhibitors of CD10, CD19, CD20, CD22, CD34, CD123, FLT-3, or ROR1. A CD19 inhibitor includes but is not limited to a CD19 CAR-expressing cell, e.g., a CD19 CART cell, or an anti-CD19 antibody (e.g., an anti-CD19 mono- or bispecific antibody) or a fragment or conjugate thereof. In an embodiment, the CD19 inhibitor is administered in combination with a B-cell inhibitor, e.g., a CAR-expressing cell described herein.

[0578] In some other embodiments, the CD19 inhibitor is administered in combination with a B-cell inhibitor, and their use in medicaments or methods for treating, among other diseases, cancer or any malignancy or autoimmune diseases involving cells or tissues which express CD19.

[0579] Numerous CD19 CAR-expressing cells are described in this disclosure. For instance, in some embodiments, a CD19 inhibitor includes an anti-CD19 CAR-expressing cell, e.g., CART, e.g., a cell expressing an anti-CD19 CAR construct described in Table 2, e.g., CTL119, or encoded by a CD19 binding CAR comprising a scFv, CDRs, or VH and VL chains described in Tables 2, 4, or 5. For example, an anti-CD19 CAR-expressing cell, e.g., CART, is a generated by engineering a CD19-CAR (that comprises a CD19 binding domain) into a cell (e.g., a T cell or NK cell), e.g., for administration in combination with a CAR-expressing cell described herein. Also provided herein are methods of use of the CAR-expressing cells described herein for adoptive therapy.

### BCMA Binding Domains and CARs

[0580] In embodiments the BCMA CAR comprises an anti-BCMA binding domain (e.g., human or humanized anti-BCMA binding domain), a transmembrane domain, and an intracellular signaling domain, and wherein said anti-BCMA binding domain comprises a heavy chain complementary determining region 1 (HC CDR1), a heavy chain complementary determining region 2 (HC CDR2), and a heavy chain complementary determining region 3 (HC CDR3) of any anti-BMCA heavy chain binding domain amino acid sequences listed in Table 4D or 4E.

[0581] In one embodiment, the anti-BCMA binding domain comprises a light chain variable region described herein (e.g., in Table 4D or 4E) and/or a heavy chain variable region described herein (e.g., in Table 4D or 4E).

[0582] In one embodiment, the encoded anti-BCMA binding domain is a scFv comprising a light chain and a heavy chain of an amino acid sequence of Table 4D or 4E.

[0583] In an embodiment, the human or humanized anti-BCMA binding domain (e.g., an scFv) comprises: a light chain variable region comprising an amino acid sequence having at least one, two or three modifications (e.g., substitutions, e.g., conservative substitutions) but not more than 30, 20 or 10 modifications (e.g., substitutions, e.g., conservative substitutions) of an amino acid sequence of a light chain variable region provided in Table 4D or 4E, or a sequence with at least 95% (e.g., 95-99%) identity thereof; and/or a heavy chain variable region comprising an amino acid sequence having at least one, two or three modifications (e.g., substitutions, e.g., conservative substitutions) but not more than 30, 20 or 10 modifications (e.g., substitutions, e.g., conservative substitutions) of an amino acid sequence of a heavy chain variable region provided in Table 4D or 4E, or a sequence with at least 95% (e.g., 95-99%) identity thereof.

TABLE 4D
Amino Acid and Nucleic Acid Sequences of exemplary anti-BCMA scFv
domains and BCMA CAR molecules

| | | |
|---|---|---|
| Name/ | SEQ | |
| Description | ID NO: | Sequence |

139109

| | | |
|---|---|---|
| 139109-aa | 1400 | EVQLVESGGGLVQPGGSLRLSCAVSGFALSNHGMSWVRRAPGKGLEWV |
| ScFv | | SGIVYSGSTYYAASVKGRFTISRDNSRNTLYLQMNSLRPEDTAIYYCS |
| domain | | AHGGESDVWGQGTTVTVSSASGGGGSGGRASGGGGSDIQLTQSPSSLS |
| | | ASVGDRVTITCRASQSISSYLNWYQQKPGKAPKLLIYAASSLQSGVPS |
| | | RFSGSGSGTDFTLTISSLQPEDFATYYCQQSYSTPYTFGQGTKVEIK |
| 139109-nt | 1401 | GAAGTGCAATTGGTGGAATCAGGGGGAGGACTTGTGCAGCCTGGAGGA |
| ScFv | | TCGCTGAGACTGTCATGTGCCGTGTCCGGCTTTGCCCTGTCCAACCAC |
| domain | | GGGATGTCCTGGGTCCGCCGCGCGCCTGGAAAGGGCCTCGAATGGGTG |
| | | TCGGGTATTGTGTACAGCGGTAGCACCTACTATGCCGCATCCGTGAAG |
| | | GGGAGATTCACCATCAGCCGGGACAACTCCAGGAACACTCTGTACCTC |
| | | CAAATGAATTCGCTGAGGCCAGAGGACACTGCCATCTACTACTGCTCC |
| | | GCGCATGGCGGAGAGTCCGACGTCTGGGGACAGGGGACCACCGTGACC |
| | | GTGTCTAGCGCGTCCGGCGGAGGCGGCAGCGGGGGTCGGGCATCAGGG |
| | | GGCGGCGGATCGGACATCCAGCTCACCCAGTCCCCGAGCTCGCTGTCC |
| | | GCCTCCGTGGGAGATCGGGTCACCATCACGTGCCGCGCCAGCCAGTCG |
| | | ATTTCCTCCTACCTGAACTGGTACCAACAGAAGCCCGGAAAAGCCCCG |
| | | AAGCTTCTCATCTACGCCGCCTCGAGCCTGCAGTCAGGAGTGCCCTCA |
| | | CGGTTCTCCGGCTCCGGTTCCGGTACTGATTTCACCCTGACCATTTCC |
| | | TCCCTGCAACCGGAGGACTTCGCTACTTACTACTGCCAGCAGTCGTAC |
| | | TCCACCCCCTACACTTTCGGACAAGGCACCAAGGTCGAAATCAAG |
| 139109-aa | 1402 | EVQLVESGGGLVQPGGSLRLSCAVSGFALSNHGMSWVRRAPGKGLEWV |
| VH | | SGIVYSGSTYYAASVKGRFTISRDNSRNTLYLQMNSLRPEDTAIYYCS |
| | | AHGGESDVWGQGTTVTVSS |
| 139109-aa | 1403 | DIQLTQSPSSLSASVGDRVTITCRASQSISSYLNWYQQKPGKAPKLLI |
| VL | | YAASSLQSGVPSRFSGSGSGTDFTLTISSLQPEDFATYYCQQSYSTPY |
| | | TFGQGTKVEIK |
| 139109-aa | 1404 | MALPVTALLLPLALLLHAARPEVQLVESGGGLVQPGGSLRLSCAVSGF |
| Full CAR | | ALSNHGMSWVRRAPGKGLEWVSGIVYSGSTYYAASVKGRFTISRDNSR |
| | | NTLYLQMNSLRPEDTAIYYCSAHGGESDVWGQGTTVTVSSASGGGGSG |
| | | GRASGGGGSDIQLTQSPSSLSASVGDRVTITCRASQSISSYLNWYQQK |
| | | PGKAPKLLIYAASSLQSGVPSRFSGSGSGTDFTLTISSLQPEDFATYY |
| | | CQQSYSTPYTFGQGTKVEIKTTTPAPRPPTPAPTIASQPLSLRPEACR |
| | | PAAGGAVHTRGLDFACDIYIWAPLAGTCGVLLLSLVITLYCKRGRKKL |
| | | LYIFKQPFMRPVQTTQEEDGCSCRFPEEEEGGCELRVKFSRSADAPAY |
| | | KQGQNQLYNELNLGRREEYDVLDKRRGRDPEMGGKPRRKNPQEGLYNE |
| | | LQKDKMAEAYSEIGMKGERRRGKGHDGLYQGLSTATKDTYDALHMQAL |
| | | PPR |
| 139109-nt | 1405 | ATGGCCCTCCCTGTCACCGCCCTGCTGCTTCCGCTGGCTCTTCTGCTC |
| Full CAR | | CACGCCGCTCGGCCCGAAGTGCAATTGGTGGAATCAGGGGGAGGACTT |
| | | GTGCAGCCTGGAGGATCGCTGAGACTGTCATGTGCCGTGTCCGGCTTT |
| | | GCCCTGTCCAACCACGGGATGTCCTGGGTCCGCCGCGCGCCTGGAAAG |
| | | GGCCTCGAATGGGTGTCGGGTATTGTGTACAGCGGTAGCACCTACTAT |
| | | GCCGCATCCGTGAAGGGGAGATTCACCATCAGCCGGGACAACTCCAGG |
| | | AACACTCTGTACCTCCAAATGAATTCGCTGAGGCCAGAGGACACTGCC |
| | | ATCTACTACTGCTCCGCGCATGGCGGAGAGTCCGACGTCTGGGGACAG |
| | | GGGACCACCGTGACCGTGTCTAGCGCGTCCGGCGGAGGCGGCAGCGGG |
| | | GGTCGGGCATCAGGGGGCGGCGGATCGGACATCCAGCTCACCCAGTCC |
| | | CCGAGCTCGCTGTCCGCCTCCGTGGGAGATCGGGTCACCATCACGTGC |
| | | CGCGCCAGCCAGTCGATTTCCTCCTACCTGAACTGGTACCAACAGAAG |
| | | CCCGGAAAAGCCCCGAAGCTTCTCATCTACGCCGCCTCGAGCCTGCAG |
| | | TCAGGAGTGCCCTCACGGTTCTCCGGCTCCGGTTCCGGTACTGATTTC |
| | | ACCCTGACCATTTCCTCCCTGCAACCGGAGGACTTCGCTACTTACTAC |
| | | TGCCAGCAGTCGTACTCCACCCCCTACACTTTCGGACAAGGCACCAAG |
| | | GTCGAAATCAAGACCACTACCCCAGCACCGAGGCCACCCACCCCGGCT |
| | | CCTACCATCGCCTCCCAGCCTCTGTCCCTGCGTCCGGAGGCATGTAGA |
| | | CCCGCAGCTGGTGGGGCCGTGCATACCCGGGGTCTTGACTTCGCCTGC |
| | | GATATCTACATTTGGGCCCCTCTGGCTGGTACTTGCGGGGTCCTGCTG |
| | | CTTTCACTCGTGATCACTCTTTACTGTAAGCGCGGTCGGAAGAAGCTG |
| | | CTGTACATCTTTAAGCAACCCTTCATGAGGCCTGTGCAGACTACTCAA |
| | | GAGGAGGACGGCTGTTCATGCCGGTTCCCAGAGGAGGAGGAAGGCGGC |
| | | TGCGAACTGCGCGTGAAATTCAGCCGCAGCGCAGATGCTCCAGCCTAC |
| | | AAGCAGGGGCAGAACCAGCTCTACAACGAACTCAATCTTGGTCGGAGA |
| | | GAGGAGTACGACGTGCTGGACAAGCGGAGAGGACGGGACCCAGAAATG |
| | | GGCGGGAAGCCGCGCAGAAAGAATCCCCAAGAGGGCCTGTACAACGAG |
| | | CTCCAAAAGGATAAGATGGCAGAAGCCTATAGCGAGATTGGTATGAAA |
| | | GGGGAACGCAGAAGAGGCAAAGGCCACGACGGACTGTACCAGGGACTC |
| | | AGCACCGCCACCAAGGACACCTATGACGCTCTTCACATGCAGGCCCTG |
| | | CCGCCTCGG |

139103

| | | |
|---|---|---|
| 139103-aa | 1406 | QVQLVESGGGLVQPGRSLRLSCAASGFTFSNYAMSWVRQAPGKGLGWV |
| ScFv | | SGISRSGENTYYADSVKGRFTISRDNSKNTLYLQMNSLRDEDTAVYYC |
| domain | | ARSPAHYYGGMDVWGQGTTVTVSSASGGGGSGGRASGGGGSDIVLTQS |
| | | PGTLSLSPGERATLSCRASQSISSSFLAWYQQKPGQAPRLLIYGASRR |
| | | ATGIPDRFSGSGSGTDFTLTISRLEPEDSAVYYCQQYHSSPSWTFGQG |
| | | TKLEIK |
| 139103-nt | 1407 | CAAGTGCAACTCGTGGAATCTGGTGGAGGACTCGTGCAACCCGGAAGA |
| ScFv | | TCGCTTAGACTGTCGTGTGCCGCCAGCGGGTTCACTTTCTCGAACTAC |
| domain | | GCGATGTCCTGGGTCCGCCAGGCACCCGGAAAGGGACTCGGTTGGGTG |
| | | TCCGGCATTTCCCGGTCCGGCGAAAATACCTACTACGCCGACTCCGTG |
| | | AAGGGCCGCTTCACCATCTCAAGGGACAACAGCAAAAACACCCTGTAC |
| | | TTGCAAATGAACTCCCTGCGGGATGAAGATACAGCCGTGTACTATTGC |
| | | GCCCGGTCGCCTGCCCATTACTACGGCGGAATGGACGTCTGGGGACAG |
| | | GGAACCACTGTGACTGTCAGCAGCGCGTCGGGTGGCGGCGGCTCAGGG |
| | | GGTCGGGCCTCCGGGGGGGGAGGGTCCGACATCGTGCTGACCCAGTCC |
| | | CCGGGAACCCTGAGCCTGAGCCCGGGAGAGCGCGCGACCCTGTCATGC |
| | | CGGGCATCCCAGAGCATTAGCTCCTCCTTTCTCGCCTGGTATCAGCAG |
| | | AAGCCCGGACAGGCCCCGAGGCTGCTGATCTACGGCGCTAGCAGAAGG |
| | | GCTACCGGAATCCCAGACCGGTTCTCCGGCTCCGGTTCCGGGACCGAT |
| | | TTCACCCTTACTATCTCGCGCCTGGAACCTGAGGACTCCGCCGTCTAC |
| | | TACTGCCAGCAGTACCACTCATCCCCGTCGTGGACGTTCGGACAGGGC |
| | | ACCAAGCTGGAGATTAAG |
| 139103-aa | 1408 | QVQLVESGGGLVQPGRSLRLSCAASGFTFSNYAMSWVRQAPGKGLGWV |
| VH | | SGISRSGENTYYADSVKGRFTISRDNSKNTLYLQMNSLRDEDTAVYYC |
| | | ARSPAHYYGGMDVWGQGTTVTVSS |
| 139103-aa | 1409 | DIVLTQSPGTLSLSPGERATLSCRASQSISSSFLAWYQQKPGQAPRLL |
| VL | | IYGASRRATGIPDRFSGSGSGTDFTLTISRLEPEDSAVYYCQQYHSSP |
| | | SWTFGQGTKLEIK |
| 139103-aa | 1410 | MALPVTALLLPLALLLHAARPQVQLVESGGGLVQPGRSLRLSCAASGF |
| Full CAR | | TFSNYAMSWVRQAPGKGLGWVSGISRSGENTYYADSVKGRFTISRDNS |
| | | KNTLYLQMNSLRDEDTAVYYCARSPAHYYGGMDVWGQGTTVTVSSASG |
| | | GGGSGGRASGGGGSDIVLTQSPGTLSLSPGERATLSCRASQSISSSFL |
| | | AWYQQKPGQAPRLLIYGASRRATGIPDRFSGSGSGTDFTLTISRLEPE |
| | | DSAVYYCQQYHSSPSWTFGQGTKLEIKTTTPAPRPPTPAPTIASQPLS |
| | | LRPEACRPAAGGAVHTRGLDFACDIYIWAPLAGTCGVLLLSLVITLYC |
| | | KRGRKKLLYIFKQPFMRPVQTTQEEDGCSCRFPEEEEGGCELRVKFSR |
| | | SADAPAYKQGQNQLYNELNLGRREEYDVLDKRRGRDPEMGGKPRRKNP |
| | | QEGLYNELQKDKMAEAYSEIGMKGERRRGKGHDGLYQGLSTATKDTYD |
| | | ALHMQALPPR |
| 139103-nt | 1411 | ATGGCCCTCCCTGTCACCGCCCTGCTGCTTCCGCTGGCTCTTCTGCTC |
| Full CAR | | CACGCCGCTCGGCCCCAAGTGCAACTCGTGGAATCTGGTGGAGGACTC |
| | | GTGCAACCCGGAAGATCGCTTAGACTGTCGTGTGCCGCCAGCGGGTTC |
| | | ACTTTCTCGAACTACGCGATGTCCTGGGTCCGCCAGGCACCCGGAAAG |
| | | GGACTCGGTTGGGTGTCCGGCATTTCCCGGTCCGGCGAAAATACCTAC |
| | | TACGCCGACTCCGTGAAGGGCCGCTTCACCATCTCAAGGGACAACAGC |
| | | AAAAACACCCTGTACTTGCAAATGAACTCCCTGCGGGATGAAGATACA |
| | | GCCGTGTACTATTGCGCCCGGTCGCCTGCCCATTACTACGGCGGAATG |
| | | GACGTCTGGGGACAGGGAACCACTGTGACTGTCAGCAGCGCGTCGGGT |
| | | GGCGGCGGCTCAGGGGGTCGGGCCTCCGGGGGGGGAGGGTCCGACATC |
| | | GTGCTGACCCAGTCCCCGGGAACCCTGAGCCTGAGCCCGGGAGAGCGC |
| | | GCGACCCTGTCATGCCGGGCATCCCAGAGCATTAGCTCCTCCTTTCTC |
| | | GCCTGGTATCAGCAGAAGCCCGGACAGGCCCCGAGGCTGCTGATCTAC |
| | | GGCGCTAGCAGAAGGGCTACCGGAATCCCAGACCGGTTCTCCGGCTCC |
| | | GGTTCCGGGACCGATTTCACCCTTACTATCTCGCGCCTGGAACCTGAG |
| | | GACTCCGCCGTCTACTACTGCCAGCAGTACCACTCATCCCCGTCGTGG |
| | | ACGTTCGGACAGGGCACCAAGCTGGAGATTAAGACCACTACCCCAGCA |
| | | CCGAGGCCACCCACCCCGGCTCCTACCATCGCCTCCCAGCCTCTGTCC |
| | | CTGCGTCCGGAGGCATGTAGACCCGCAGCTGGTGGGGCCGTGCATACC |
| | | CGGGGTCTTGACTTCGCCTGCGATATCTACATTTGGGCCCCTCTGGCT |
| | | GGTACTTGCGGGGTCCTGCTGCTTTCACTCGTGATCACTCTTTACTGT |
| | | AAGCGCGGTCGGAAGAAGCTGCTGTACATCTTTAAGCAACCCTTCATG |
| | | AGGCCTGTGCAGACTACTCAAGAGGAGGACGGCTGTTCATGCCGGTTC |
| | | CCAGAGGAGGAGGAAGGCGGCTGCGAACTGCGCGTGAAATTCAGCCGC |
| | | AGCGCAGATGCTCCAGCCTACAAGCAGGGGCAGAACCAGCTCTACAAC |
| | | GAACTCAATCTTGGTCGGAGAGAGGAGTACGACGTGCTGGACAAGCGG |
| | | AGAGGACGGGACCCAGAAATGGGCGGGAAGCCGCGCAGAAAGAATCCC |
| | | CAAGAGGGCCTGTACAACGAGCTCCAAAAGGATAAGATGGCAGAAGCC |
| | | TATAGCGAGATTGGTATGAAAGGGGAACGCAGAAGAGGCAAAGGCCAC |
| | | GACGGACTGTACCAGGGACTCAGCACCGCCACCAAGGACACCTATGAC |
| | | GCTCTTCACATGCAGGCCCTGCCGCCTCGG |

139105

| | | |
|---|---|---|
| 139105-aa | 1412 | QVQLVESGGGLVQPGRSLRLSCAASGFTFDDYAMHWVRQAPGKGLEWV |
| ScFv | | SGISWNSGSIGYADSVKGRFTISRDNAKNSLYLQMNSLRAEDTALYYC |
| domain | | SVHSFLAYWGQGTLVTVSSASGGGGSGGRASGGGGSDIVMTQTPLSLP |
| | | VTPGEPASISCRSSQSLLHSNGYNYLDWYLQKPGQSPQLLIYLGSNRA |
| | | SGVPDRFSGSGSGTDFTLKISRVEAEDVGVYYCMQALQTPYTFGQGTK |
| | | VEIK |
| 139105-nt | 1413 | CAAGTGCAACTCGTCGAATCCGGTGGAGGTCTGGTCCAACCTGGTAGA |
| ScFv | | AGCCTGAGACTGTCGTGTGCGGCCAGCGGATTCACCTTTGATGACTAT |
| domain | | GCTATGCACTGGGTGCGGCAGGCCCCAGGAAAGGGCCTGGAATGGGTG |
| | | TCGGGAATTAGCTGGAACTCCGGGTCCATTGGCTACGCCGACTCCGTG |
| | | AAGGGCCGCTTCACCATCTCCCGCGACAACGCAAAGAACTCCCTGTAC |
| | | TTGCAAATGAACTCGCTCAGGGCTGAGGATACCGCGCTGTACTACTGC |
| | | TCCGTGCATTCCTTCCTGGCCTACTGGGGACAGGGAACTCTGGTCACC |
| | | GTGTCGAGCGCCTCCGGCGGCGGGGGCTCGGGTGGACGGGCCTCGGGC |
| | | GGAGGGGGGTCCGACATCGTGATGACCCAGACCCCGCTGAGCTTGCCC |
| | | GTGACTCCCGGAGAGCCTGCATCCATCTCCTGCCGGTCATCCCAGTCC |
| | | CTTCTCCACTCCAACGGATACAACTACCTCGACTGGTACCTCCAGAAG |
| | | CCGGGACAGAGCCCTCAGCTTCTGATCTACCTGGGGTCAAATAGAGCC |
| | | TCAGGAGTGCCGGATCGGTTCAGCGGATCTGGTTCGGGAACTGATTTC |
| | | ACTCTGAAGATTTCCCGCGTGGAAGCCGAGGACGTGGGCGTCTACTAC |
| | | TGTATGCAGGCGCTGCAGACCCCCTATACCTTCGGCCAAGGGACGAAA |
| | | GTGGAGATCAAG |
| 139105-aa | 1414 | QVQLVESGGGLVQPGRSLRLSCAASGFTFDDYAMHWVRQAPGKGLEWV |
| VH | | SGISWNSGSIGYADSVKGRFTISRDNAKNSLYLQMNSLRAEDTALYYC |
| | | SVHSFLAYWGQGTLVTVSS |
| 139105-aa | 1415 | DIVMTQTPLSLPVTPGEPASISCRSSQSLLHSNGYNYLDWYLQKPGQS |
| VL | | PQLLIYLGSNRASGVPDRFSGSGSGTDFTLKISRVEAEDVGVYYCMQA |
| | | LQTPYTFGQGTKVEIK |
| 139105-aa | 1416 | MALPVTALLLPLALLLHAARPQVQLVESGGGLVQPGRSLRLSCAASGF |
| Full CAR | | TFDDYAMHWVRQAPGKGLEWVSGISWNSGSIGYADSVKGRFTISRDNA |
| | | KNSLYLQMNSLRAEDTALYYCSVHSFLAYWGQGTLVTVSSASGGGGSG |
| | | GRASGGGGSDIVMTQTPLSLPVTPGEPASISCRSSQSLLHSNGYNYLD |
| | | WYLQKPGQSPQLLIYLGSNRASGVPDRFSGSGSGTDFTLKISRVEAED |
| | | VGVYYCMQALQTPYTFGQGTKVEIKTTTPAPRPPTPAPTIASQPLSLR |
| | | PEACRPAAGGAVHTRGLDFACDIYIWAPLAGTCGVLLLSLVITLYCKR |
| | | GRKKLLYIFKQPFMRPVQTTQEEDGCSCRFPEEEEGGCELRVKFSRSA |
| | | DAPAYKQGQNQLYNELNLGRREEYDVLDKRRGRDPEMGGKPRRKNPQE |
| | | GLYNELQKDKMAEAYSEIGMKGERRRGKGHDGLYQGLSTATKDTYDAL |
| | | HMQALPPR |
| 139105-nt | 1417 | ATGGCCCTCCCTGTCACCGCCCTGCTGCTTCCGCTGGCTCTTCTGCTC |
| Full CAR | | CACGCCGCTCGGCCCCAAGTGCAACTCGTCGAATCCGGTGGAGGTCTG |
| | | GTCCAACCTGGTAGAAGCCTGAGACTGTCGTGTGCGGCCAGCGGATTC |
| | | ACCTTTGATGACTATGCTATGCACTGGGTGCGGCAGGCCCCAGGAAAG |
| | | GGCCTGGAATGGGTGTCGGGAATTAGCTGGAACTCCGGGTCCATTGGC |
| | | TACGCCGACTCCGTGAAGGGCCGCTTCACCATCTCCCGCGACAACGCA |
| | | AAGAACTCCCTGTACTTGCAAATGAACTCGCTCAGGGCTGAGGATACC |
| | | GCGCTGTACTACTGCTCCGTGCATTCCTTCCTGGCCTACTGGGGACAG |
| | | GGAACTCTGGTCACCGTGTCGAGCGCCTCCGGCGGCGGGGGCTCGGGT |
| | | GGACGGGCCTCGGGCGGAGGGGGGTCCGACATCGTGATGACCCAGACC |
| | | CCGCTGAGCTTGCCCGTGACTCCCGGAGAGCCTGCATCCATCTCCTGC |
| | | CGGTCATCCCAGTCCCTTCTCCACTCCAACGGATACAACTACCTCGAC |
| | | TGGTACCTCCAGAAGCCGGGACAGAGCCCTCAGCTTCTGATCTACCTG |
| | | GGGTCAAATAGAGCCTCAGGAGTGCCGGATCGGTTCAGCGGATCTGGT |
| | | TCGGGAACTGATTTCACTCTGAAGATTTCCCGCGTGGAAGCCGAGGAC |
| | | GTGGGCGTCTACTACTGTATGCAGGCGCTGCAGACCCCCTATACCTTC |
| | | GGCCAAGGGACGAAAGTGGAGATCAAGACCACTACCCCAGCACCGAGG |
| | | CCACCCACCCCGGCTCCTACCATCGCCTCCCAGCCTCTGTCCCTGCGT |
| | | CCGGAGGCATGTAGACCCGCAGCTGGTGGGGCCGTGCATACCCGGGGT |
| | | CTTGACTTCGCCTGCGATATCTACATTTGGGCCCCTCTGGCTGGTACT |
| | | TGCGGGGTCCTGCTGCTTTCACTCGTGATCACTCTTTACTGTAAGCGC |
| | | GGTCGGAAGAAGCTGCTGTACATCTTTAAGCAACCCTTCATGAGGCCT |
| | | GTGCAGACTACTCAAGAGGAGGACGGCTGTTCATGCCGGTTCCCAGAG |
| | | GAGGAGGAAGGCGGCTGCGAACTGCGCGTGAAATTCAGCCGCAGCGCA |
| | | GATGCTCCAGCCTACAAGCAGGGGCAGAACCAGCTCTACAACGAACTC |
| | | AATCTTGGTCGGAGAGAGGAGTACGACGTGCTGGACAAGCGGAGAGGA |
| | | CGGGACCCAGAAATGGGCGGGAAGCCGCGCAGAAAGAATCCCCAAGAG |
| | | GGCCTGTACAACGAGCTCCAAAAGGATAAGATGGCAGAAGCCTATAGC |
| | | GAGATTGGTATGAAAGGGGAACGCAGAAGAGGCAAAGGCCACGACGGA |
| | | CTGTACCAGGGACTCAGCACCGCCACCAAGGACACCTATGACGCTCTT |
| | | CACATGCAGGCCCTGCCGCCTCGG |

139111

| | | |
|---|---|---|
| 139111-aa | 1418 | EVQLLESGGGLVQPGGSLRLSCAVSGFALSNHGMSWVRRAPGKGLEWV |
| ScFv | | SGIVYSGSTYYAASVKGRFTISRDNSRNTLYLQMNSLRPEDTAIYYCS |
| domain | | AHGGESDVWGQGTTVTVSSASGGGGSGGRASGGGGSDIVMTQTPLSLS |
| | | VTPGQPASISCKSSQSLLRNDGKTPLYWYLQKAGQPPQLLIYEVSNRF |
| | | SGVPDRFSGSGSGTDFTLKISRVEAEDVGAYYCMQNIQFPSFGGGTKL |
| | | EIK |
| 139111-nt | 1419 | GAAGTGCAATTGTTGGAATCTGGAGGAGGACTTGTGCAGCCTGGAGGA |
| ScFv | | TCACTGAGACTTTCGTGTGCGGTGTCAGGCTTCGCCCTGAGCAACCAC |
| domain | | GGCATGAGCTGGGTGCGGAGAGCCCCGGGGAAGGGTCTGGAATGGGTG |
| | | TCCGGGATCGTCTACTCCGGTTCAACTTACTACGCCGCAAGCGTGAAG |
| | | GGTCGCTTCACCATTTCCCGCGATAACTCCCGGAACACCCTGTACCTC |
| | | CAAATGAACTCCCTGCGGCCCGAGGACACCGCCATCTACTACTGTTCC |
| | | GCGCATGGAGGAGAGTCCGATGTCTGGGGACAGGGCACTACCGTGACC |
| | | GTGTCGAGCGCCTCGGGGGGAGGAGGCTCCGGCGGTCGCGCCTCCGGG |
| | | GGGGGTGGCAGCGACATTGTGATGACGCAGACTCCACTCTCGCTGTCC |
| | | GTGACCCCGGGACAGCCCGCGTCCATCTCGTGCAAGAGCTCCCAGAGC |
| | | CTGCTGAGGAACGACGGAAAGACTCCTCTGTATTGGTACCTCCAGAAG |
| | | GCTGGACAGCCCCCGCAACTGCTCATCTACGAAGTGTCAAATCGCTTC |
| | | TCCGGGGTGCCGGATCGGTTTTCCGGCTCGGGATCGGGCACCGACTTC |
| | | ACCCTGAAAATCTCCAGGGTCGAGGCCGAGGACGTGGGAGCCTACTAC |
| | | TGCATGCAAAACATCCAGTTCCCTTCCTTCGGCGGCGGCACAAAGCTG |
| | | GAGATTAAG |
| 139111-aa | 1420 | EVQLLESGGGLVQPGGSLRLSCAVSGFALSNHGMSWVRRAPGKGLEWV |
| VH | | SGIVYSGSTYYAASVKGRFTISRDNSRNTLYLQMNSLRPEDTAIYYCS |
| | | AHGGESDVWGQGTTVTVSS |
| 139111-aa | 1421 | DIVMTQTPLSLSVTPGQPASISCKSSQSLLRNDGKTPLYWYLQKAGQP |
| VL | | PQLLIYEVSNRFSGVPDRFSGSGSGTDFTLKISRVEAEDVGAYYCMQN |
| | | IQFPSFGGGTKLEIK |
| 139111-aa | 1422 | MALPVTALLLPLALLLHAARPEVQLLESGGGLVQPGGSLRLSCAVSGF |
| Full CAR | | ALSNHGMSWVRRAPGKGLEWVSGIVYSGSTYYAASVKGRFTISRDNSR |
| | | NTLYLQMNSLRPEDTAIYYCSAHGGESDVWGQGTTVTVSSASGGGGSG |
| | | GRASGGGGSDIVMTQTPLSLSVTPGQPASISCKSSQSLLRNDGKTPLY |
| | | WYLQKAGQPPQLLIYEVSNRFSGVPDRFSGSGSGTDFTLKISRVEAED |
| | | VGAYYCMQNIQFPSFGGGTKLEIKTTTPAPRPPTPAPTIASQPLSLRP |
| | | EACRPAAGGAVHTRGLDFACDIYIWAPLAGTCGVLLLSLVITLYCKRG |
| | | RKKLLYIFKQPFMRPVQTTQEEDGCSCREPEEEEGGCELRVKFSRSAD |
| | | APAYKQGQNQLYNELNLGRREEYDVLDKRRGRDPEMGGKPRRKNPQEG |
| | | LYNELQKDKMAEAYSEIGMKGERRRGKGHDGLYQGLSTATKDTYDALH |
| | | MQALPPR |
| 139111-nt | 1423 | ATGGCCCTCCCTGTCACCGCCCTGCTGCTTCCGCTGGCTCTTCTGCTC |
| Full CAR | | CACGCCGCTCGGCCCGAAGTGCAATTGTTGGAATCTGGAGGAGGACTT |
| | | GTGCAGCCTGGAGGATCACTGAGACTTTCGTGTGCGGTGTCAGGCTTC |
| | | GCCCTGAGCAACCACGGCATGAGCTGGGTGCGGAGAGCCCCGGGGAAG |
| | | GGTCTGGAATGGGTGTCCGGGATCGTCTACTCCGGTTCAACTTACTAC |
| | | GCCGCAAGCGTGAAGGGTCGCTTCACCATTTCCCGCGATAACTCCCGG |
| | | AACACCCTGTACCTCCAAATGAACTCCCTGCGGCCCGAGGACACCGCC |
| | | ATCTACTACTGTTCCGCGCATGGAGGAGAGTCCGATGTCTGGGGACAG |
| | | GGCACTACCGTGACCGTGTCGAGCGCCTCGGGGGGAGGAGGCTCCGGC |
| | | GGTCGCGCCTCCGGGGGGGGTGGCAGCGACATTGTGATGACGCAGACT |
| | | CCACTCTCGCTGTCCGTGACCCCGGGACAGCCCGCGTCCATCTCGTGC |
| | | AAGAGCTCCCAGAGCCTGCTGAGGAACGACGGAAAGACTCCTCTGTAT |
| | | TGGTACCTCCAGAAGGCTGGACAGCCCCCGCAACTGCTCATCTACGAA |
| | | GTGTCAAATCGCTTCTCCGGGGTGCCGGATCGGTTTTCCGGCTCGGGA |
| | | TCGGGCACCGACTTCACCCTGAAAATCTCCAGGGTCGAGGCCGAGGAC |
| | | GTGGGAGCCTACTACTGCATGCAAAACATCCAGTTCCCTTCCTTCGGC |
| | | GGCGGCACAAAGCTGGAGATTAAGACCACTACCCCAGCACCGAGGCCA |
| | | CCCACCCCGGCTCCTACCATCGCCTCCCAGCCTCTGTCCCTGCGTCCG |
| | | GAGGCATGTAGACCCGCAGCTGGTGGGGCCGTGCATACCCGGGGTCTT |
| | | GACTTCGCCTGCGATATCTACATTTGGGCCCCTCTGGCTGGTACTTGC |
| | | GGGGTCCTGCTGCTTTCACTCGTGATCACTCTTTACTGTAAGCGCGGT |
| | | CGGAAGAAGCTGCTGTACATCTTTAAGCAACCCTTCATGAGGCCTGTG |
| | | CAGACTACTCAAGAGGAGGACGGCTGTTCATGCCGGTTCCCAGAGGAG |
| | | GAGGAAGGCGGCTGCGAACTGCGCGTGAAATTCAGCCGCAGCGCAGAT |
| | | GCTCCAGCCTACAAGCAGGGGCAGAACCAGCTCTACAACGAACTCAAT |
| | | CTTGGTCGGAGAGAGGAGTACGACGTGCTGGACAAGCGGAGAGGACGG |
| | | GACCCAGAAATGGGCGGGAAGCCGCGCAGAAAGAATCCCCAAGAGGGC |
| | | CTGTACAACGAGCTCCAAAAGGATAAGATGGCAGAAGCCTATAGCGAG |
| | | ATTGGTATGAAAGGGGAACGCAGAAGAGGCAAAGGCCACGACGGACTG |
| | | TACCAGGGACTCAGCACCGCCACCAAGGACACCTATGACGCTCTTCAC |
| | | ATGCAGGCCCTGCCGCCTCGG |

139100

| | | |
|---|---|---|
| 139100-aa | 1424 | QVQLVQSGAEVRKTGASVKVSCKASGYIFDNFGINWVRQAPGQGLEWM |
| ScFv | | GWINPKNNNTNYAQKFQGRVTITADESTNTAYMEVSSLRSEDTAVYYC |
| domain | | ARGPYYYQSYMDVWGQGTMVTVSSASGGGGSGGRASGGGGSDIVMTQT |
| | | PLSLPVTPGEPASISCRSSQSLLHSNGYNYLNWYLQKPGQSPQLLIYL |
| | | GSKRASGVPDRFSGSGSGTDFTLHITRVGAEDVGVYYCMQALQTPYTF |
| | | GQGTKLEIK |
| 139100-nt | 1425 | CAAGTCCAACTCGTCCAGTCCGGCGCAGAAGTCAGAAAAACCGGTGCT |
| ScFv | | AGCGTGAAAGTGTCCTGCAAGGCCTCCGGCTACATTTTCGATAACTTC |
| domain | | GGAATCAACTGGGTCAGACAGGCCCCGGGCCAGGGGCTGGAATGGATG |
| | | GGATGGATCAACCCCAAGAACAACAACACCAACTACGCACAGAAGTTC |
| | | CAGGGCCGCGTGACTATCACCGCCGATGAATCGACCAATACCGCCTAC |
| | | ATGGAGGTGTCCTCCCTGCGGTCGGAGGACACTGCCGTGTATTACTGC |
| | | GCGAGGGGCCCATACTACTACCAAAGCTACATGGACGTCTGGGGACAG |
| | | GGAACCATGGTGACCGTGTCATCCGCCTCCGGTGGTGGAGGCTCCGGG |
| | | GGGCGGGCTTCAGGAGGCGGAGGAAGCGATATTGTGATGACCCAGACT |
| | | CCGCTTAGCCTGCCCGTGACTCCTGGAGAACCGGCCTCCATTTCCTGC |
| | | CGGTCCTCGCAATCACTCCTGCATTCCAACGGTTACAACTACCTGAAT |
| | | TGGTACCTCCAGAAGCCTGGCCAGTCGCCCCAGTTGCTGATCTATCTG |
| | | GGCTCGAAGCGCGCCTCCGGGGTGCCTGACCGGTTTAGCGGATCTGGG |
| | | AGCGGCACGGACTTCACTCTCCACATCACCCGCGTGGGAGCGGAGGAC |
| | | GTGGGAGTGTACTACTGTATGCAGGCGCTGCAGACTCCGTACACATTC |
| | | GGACAGGGCACCAAGCTGGAGATCAAG |
| 139100-aa | 1426 | QVQLVQSGAEVRKTGASVKVSCKASGYIFDNFGINWVRQAPGQGLEWM |
| VH | | GWINPKNNNTNYAQKFQGRVTITADESTNTAYMEVSSLRSEDTAVYYC |
| | | ARGPYYYQSYMDVWGQGTMVTVSS |
| 139100-aa | 1427 | DIVMTQTPLSLPVTPGEPASISCRSSQSLLHSNGYNYLNWYLQKPGQS |
| VL | | PQLLIYLGSKRASGVPDRFSGSGSGTDFTLHITRVGAEDVGVYYCMQA |
| | | LQTPYTFGQGTKLEIK |
| 139100-aa | 1428 | MALPVTALLLPLALLLHAARPQVQLVQSGAEVRKTGASVKVSCKASGY |
| Full CAR | | IFDNFGINWVRQAPGQGLEWMGWINPKNNNTNYAQKFQGRVTITADES |
| | | TNTAYMEVSSLRSEDTAVYYCARGPYYYQSYMDVWGQGTMVTVSSASG |
| | | GGGSGGRASGGGGSDIVMTQTPLSLPVTPGEPASISCRSSQSLLHSNG |
| | | YNYLNWYLQKPGQSPQLLIYLGSKRASGVPDRFSGSGSGTDFTLHITR |
| | | VGAEDVGVYYCMQALQTPYTFGQGTKLEIKTTTPAPRPPTPAPTIASQ |
| | | PLSLRPEACRPAAGGAVHTRGLDFACDIYIWAPLAGTCGVLLLSLVIT |
| | | LYCKRGRKKLLYIFKQPFMRPVQTTQEEDGCSCRFPEEEEGGCELRVK |
| | | FSRSADAPAYKQGQNQLYNELNLGRREEYDVLDKRRGRDPEMGGKPRR |
| | | KNPQEGLYNELQKDKMAEAYSEIGMKGERRRGKGHDGLYQGLSTATKD |
| | | TYDALHMQALPPR |
| 139100-nt | 1429 | ATGGCCCTCCCTGTCACCGCCCTGCTGCTTCCGCTGGCTCTTCTGCTC |
| Full CAR | | CACGCCGCTCGGCCCCAAGTCCAACTCGTCCAGTCCGGCGCAGAAGTC |
| | | AGAAAAACCGGTGCTAGCGTGAAAGTGTCCTGCAAGGCCTCCGGCTAC |
| | | ATTTTCGATAACTTCGGAATCAACTGGGTCAGACAGGCCCCGGGCCAG |
| | | GGGCTGGAATGGATGGGATGGATCAACCCCAAGAACAACAACACCAAC |
| | | TACGCACAGAAGTTCCAGGGCCGCGTGACTATCACCGCCGATGAATCG |
| | | ACCAATACCGCCTACATGGAGGTGTCCTCCCTGCGGTCGGAGGACACT |
| | | GCCGTGTATTACTGCGCGAGGGGCCCATACTACTACCAAAGCTACATG |
| | | GACGTCTGGGGACAGGGAACCATGGTGACCGTGTCATCCGCCTCCGGT |
| | | GGTGGAGGCTCCGGGGGGCGGGCTTCAGGAGGCGGAGGAAGCGATATT |
| | | GTGATGACCCAGACTCCGCTTAGCCTGCCCGTGACTCCTGGAGAACCG |
| | | GCCTCCATTTCCTGCCGGTCCTCGCAATCACTCCTGCATTCCAACGGT |
| | | TACAACTACCTGAATTGGTACCTCCAGAAGCCTGGCCAGTCGCCCCAG |
| | | TTGCTGATCTATCTGGGCTCGAAGCGCGCCTCCGGGGTGCCTGACCGG |
| | | TTTAGCGGATCTGGGAGCGGCACGGACTTCACTCTCCACATCACCCGC |
| | | GTGGGAGCGGAGGACGTGGGAGTGTACTACTGTATGCAGGCGCTGCAG |
| | | ACTCCGTACACATTCGGACAGGGCACCAAGCTGGAGATCAAGACCACT |
| | | ACCCCAGCACCGAGGCCACCCACCCCGGCTCCTACCATCGCCTCCCAG |
| | | CCTCTGTCCCTGCGTCCGGAGGCATGTAGACCCGCAGCTGGTGGGGCC |
| | | GTGCATACCCGGGGTCTTGACTTCGCCTGCGATATCTACATTTGGGCC |
| | | CCTCTGGCTGGTACTTGCGGGGTCCTGCTGCTTTCACTCGTGATCACT |
| | | CTTTACTGTAAGCGCGGTCGGAAGAAGCTGCTGTACATCTTTAAGCAA |
| | | CCCTTCATGAGGCCTGTGCAGACTACTCAAGAGGAGGACGGCTGTTCA |
| | | TGCCGGTTCCCAGAGGAGGAGGAAGGCGGCTGCGAACTGCGCGTGAAA |
| | | TTCAGCCGCAGCGCAGATGCTCCAGCCTACAAGCAGGGGCAGAACCAG |
| | | CTCTACAACGAACTCAATCTTGGTCGGAGAGAGGAGTACGACGTGCTG |
| | | GACAAGCGGAGAGGACGGGACCCAGAAATGGGCGGGAAGCCGCGCAGA |
| | | AAGAATCCCCAAGAGGGCCTGTACAACGAGCTCCAAAAGGATAAGATG |
| | | GCAGAAGCCTATAGCGAGATTGGTATGAAAGGGGAACGCAGAAGAGGC |
| | | AAAGGCCACGACGGACTGTACCAGGGACTCAGCACCGCCACCAAGGAC |
| | | ACCTATGACGCTCTTCACATGCAGGCCCTGCCGCCTCGG |

139101

| | | |
|---|---|---|
| 139101-aa | 1430 | QVQLQESGGGLVQPGGSLRLSCAASGFTFSSDAMTWVRQAPGKGLEWV |
| ScFv | | SVISGSGGTTYYADSVKGRFTISRDNSKNTLYLQMNSLRAEDTAVYYC |
| domain | | AKLDSSGYYYARGPRYWGQGTLVTVSSASGGGGSGGRASGGGGSDIQL |
| | | TQSPSSLSASVGDRVTITCRASQSISSYLNWYQQKPGKAPKLLIYGAS |
| | | TLASGVPARFSGSGSGTHFTLTINSLQSEDSATYYCQQSYKRASFGQG |
| | | TKVEIK |
| 139101-nt | 1431 | CAAGTGCAACTTCAAGAATCAGGCGGAGGACTCGTGCAGCCCGGAGGA |
| ScFv | | TCATTGCGGCTCTCGTGCGCCGCCTCGGGCTTCACCTTCTCGAGCGAC |
| domain | | GCCATGACCTGGGTCCGCCAGGCCCCGGGGAAGGGGCTGGAATGGGTG |
| | | TCTGTGATTTCCGGCTCCGGGGGAACTACGTACTACGCCGATTCCGTG |
| | | AAAGGTCGCTTCACTATCTCCCGGGACAACAGCAAGAACACCCTTTAT |
| | | CTGCAAATGAATTCCCTCCGCGCCGAGGACACCGCCGTGTACTACTGC |
| | | GCCAAGCTGGACTCCTCGGGCTACTACTATGCCCGGGGTCCGAGATAC |
| | | TGGGGACAGGGAACCCTCGTGACCGTGTCCTCCGCGTCCGGCGGAGGA |
| | | GGGTCGGGAGGGCGGGCCTCCGGCGGCGGCGGTTCGGACATCCAGCTG |
| | | ACCCAGTCCCCATCCTCACTGAGCGCAAGCGTGGGCGACAGAGTCACC |
| | | ATTACATGCAGGGCGTCCCAGAGCATCAGCTCCTACCTGAACTGGTAC |
| | | CAACAGAAGCCTGGAAAGGCTCCTAAGCTGTTGATCTACGGGGCTTCG |
| | | ACCCTGGCATCCGGGGTGCCCGCGAGGTTTAGCGGAAGCGGTAGCGGC |
| | | ACTCACTTCACTCTGACCATTAACAGCCTCCAGTCCGAGGATTCAGCC |
| | | ACTTACTACTGTCAGCAGTCCTACAAGCGGGCCAGCTTCGGACAGGGC |
| | | ACTAAGGTCGAGATCAAG |
| 139101-aa | 1432 | QVQLQESGGGLVQPGGSLRLSCAASGFTFSSDAMTWVRQAPGKGLEWV |
| VH | | SVISGSGGTTYYADSVKGRFTISRDNSKNTLYLQMNSLRAEDTAVYYC |
| | | AKLDSSGYYYARGPRYWGQGTLVTVSS |
| 139101-aa | 1433 | DIQLTQSPSSLSASVGDRVTITCRASQSISSYLNWYQQKPGKAPKLLI |
| VL | | YGASTLASGVPARFSGSGSGTHFTLTINSLQSEDSATYYCQQSYKRAS |
| | | FGQGTKVEIK |
| 139101-aa | 1434 | MALPVTALLLPLALLLHAARPQVQLQESGGGLVQPGGSLRLSCAASGF |
| Full CAR | | TFSSDAMTWVRQAPGKGLEWVSVISGSGGTTYYADSVKGRFTISRDNS |
| | | KNTLYLQMNSLRAEDTAVYYCAKLDSSGYYYARGPRYWGQGTLVTVSS |
| | | ASGGGGSGGRASGGGGSDIQLTQSPSSLSASVGDRVTITCRASQSISS |
| | | YLNWYQQKPGKAPKLLIYGASTLASGVPARFSGSGSGTHFTLTINSLQ |
| | | SEDSATYYCQQSYKRASFGQGTKVEIKTTTPAPRPPTPAPTIASQPLS |
| | | LRPEACRPAAGGAVHTRGLDFACDIYIWAPLAGTCGVLLLSLVITLYC |
| | | KRGRKKLLYIFKQPFMRPVQTTQEEDGCSCRFPEEEEGGCELRVKFSR |
| | | SADAPAYKQGQNQLYNELNLGRREEYDVLDKRRGRDPEMGGKPRRKNP |
| | | QEGLYNELQKDKMAEAYSEIGMKGERRRGKGHDGLYQGLSTATKDTYD |
| | | ALHMQALPPR |
| 139101-nt | 1435 | ATGGCCCTCCCTGTCACCGCCCTGCTGCTTCCGCTGGCTCTTCTGCTC |
| Full CAR | | CACGCCGCTCGGCCCCAAGTGCAACTTCAAGAATCAGGCGGAGGACTC |
| | | GTGCAGCCCGGAGGATCATTGCGGCTCTCGTGCGCCGCCTCGGGCTTC |
| | | ACCTTCTCGAGCGACGCCATGACCTGGGTCCGCCAGGCCCCGGGGAAG |
| | | GGGCTGGAATGGGTGTCTGTGATTTCCGGCTCCGGGGGAACTACGTAC |
| | | TACGCCGATTCCGTGAAAGGTCGCTTCACTATCTCCCGGGACAACAGC |
| | | AAGAACACCCTTTATCTGCAAATGAATTCCCTCCGCGCCGAGGACACC |
| | | GCCGTGTACTACTGCGCCAAGCTGGACTCCTCGGGCTACTACTATGCC |
| | | CGGGGTCCGAGATACTGGGGACAGGGAACCCTCGTGACCGTGTCCTCC |
| | | GCGTCCGGCGGAGGAGGGTCGGGAGGGCGGGCCTCCGGCGGCGGCGGT |
| | | TCGGACATCCAGCTGACCCAGTCCCCATCCTCACTGAGCGCAAGCGTG |
| | | GGCGACAGAGTCACCATTACATGCAGGGCGTCCCAGAGCATCAGCTCC |
| | | TACCTGAACTGGTACCAACAGAAGCCTGGAAAGGCTCCTAAGCTGTTG |
| | | ATCTACGGGGCTTCGACCCTGGCATCCGGGGTGCCCGCGAGGTTTAGC |
| | | GGAAGCGGTAGCGGCACTCACTTCACTCTGACCATTAACAGCCTCCAG |
| | | TCCGAGGATTCAGCCACTTACTACTGTCAGCAGTCCTACAAGCGGGCC |
| | | AGCTTCGGACAGGGCACTAAGGTCGAGATCAAGACCACTACCCCAGCA |
| | | CCGAGGCCACCCACCCCGGCTCCTACCATCGCCTCCCAGCCTCTGTCC |
| | | CTGCGTCCGGAGGCATGTAGACCCGCAGCTGGTGGGGCCGTGCATACC |
| | | CGGGGTCTTGACTTCGCCTGCGATATCTACATTTGGGCCCCTCTGGCT |
| | | GGTACTTGCGGGGTCCTGCTGCTTTCACTCGTGATCACTCTTTACTGT |
| | | AAGCGCGGTCGGAAGAAGCTGCTGTACATCTTTAAGCAACCCTTCATG |
| | | AGGCCTGTGCAGACTACTCAAGAGGAGGACGGCTGTTCATGCCGGTTC |
| | | CCAGAGGAGGAGGAAGGCGGCTGCGAACTGCGCGTGAAATTCAGCCGC |
| | | AGCGCAGATGCTCCAGCCTACAAGCAGGGGCAGAACCAGCTCTACAAC |
| | | GAACTCAATCTTGGTCGGAGAGAGGAGTACGACGTGCTGGACAAGCGG |
| | | AGAGGACGGGACCCAGAAATGGGCGGGAAGCCGCGCAGAAAGAATCCC |
| | | CAAGAGGGCCTGTACAACGAGCTCCAAAAGGATAAGATGGCAGAAGCC |
| | | TATAGCGAGATTGGTATGAAAGGGGAACGCAGAAGAGGCAAAGGCCAC |
| | | GACGGACTGTACCAGGGACTCAGCACCGCCACCAAGGACACCTATGAC |
| | | GCTCTTCACATGCAGGCCCTGCCGCCTCGG |

139102

| | | |
|---|---|---|
| 139102-aa | 1436 | QVQLVQSGAEVKKPGASVKVSCKASGYTFSNYGITWVRQAPGQGLEWM |
| ScFv | | GWISAYNGNTNYAQKFQGRVTMTRNTSISTAYMELSSLRSEDTAVYYC |
| domain | | ARGPYYYYMDVWGKGTMVTVSSASGGGGSGGRASGGGGSEIVMTQSPL |
| | | SLPVTPGEPASISCRSSQSLLYSNGYNYVDWYLQKPGQSPQLLIYLGS |
| | | NRASGVPDRFSGSGSGTDFKLQISRVEAEDVGIYYCMQGRQFPYSFGQ |
| | | GTKVEIK |
| 139102-nt | 1437 | CAAGTCCAACTGGTCCAGAGCGGTGCAGAAGTGAAGAAGCCCGGAGCG |
| ScFv | | AGCGTGAAAGTGTCCTGCAAGGCTTCCGGGTACACCTTCTCCAACTAC |
| domain | | GGCATCACTTGGGTGCGCCAGGCCCCGGGACAGGGCCTGGAATGGATG |
| | | GGGTGGATTTCCGCGTACAACGGCAATACGAACTACGCTCAGAAGTTC |
| | | CAGGGTAGAGTGACCATGACTAGGAACACCTCCATTTCCACCGCCTAC |
| | | ATGGAACTGTCCTCCCTGCGGAGCGAGGACACCGCCGTGTACTATTGC |
| | | GCCCGGGGACCATACTACTACTACATGGATGTCTGGGGGAAGGGGACT |
| | | ATGGTCACCGTGTCATCCGCCTCGGGAGGCGGCGGATCAGGAGGACGC |
| | | GCCTCTGGTGGTGGAGGATCGGAGATCGTGATGACCCAGAGCCCTCTC |
| | | TCCTTGCCCGTGACTCCTGGGGAGCCCGCATCCATTTCATGCCGGAGC |
| | | TCCCAGTCACTTCTCTACTCCAACGGCTATAACTACGTGGATTGGTAC |
| | | CTCCAAAAGCCGGGCCAGAGCCCGCAGCTGCTGATCTACCTGGGCTCG |
| | | AACAGGGCCAGCGGAGTGCCTGACCGGTTCTCCGGGTCGGGAAGCGGG |
| | | ACCGACTTCAAGCTGCAAATCTCGAGAGTGGAGGCCGAGGACGTGGGA |
| | | ATCTACTACTGTATGCAGGGCCGCCAGTTTCCGTACTCGTTCGGACAG |
| | | GGCACCAAAGTGGAAATCAAG |
| 139102-aa | 1438 | QVQLVQSGAEVKKPGASVKVSCKASGYTFSNYGITWVRQAPGQGLEWM |
| VH | | GWISAYNGNTNYAQKFQGRVTMTRNTSISTAYMELSSLRSEDTAVYYC |
| | | ARGPYYYYMDVWGKGTMVTVSS |
| 139102-aa | 1439 | EIVMTQSPLSLPVTPGEPASISCRSSQSLLYSNGYNYVDWYLQKPGQS |
| VL | | PQLLIYLGSNRASGVPDRFSGSGSGTDFKLQISRVEAEDVGIYYCMQG |
| | | RQFPYSFGQGTKVEIK |
| 139102-aa | 1440 | MALPVTALLLPLALLLHAARPQVQLVQSGAEVKKPGASVKVSCKASGY |
| Full CAR | | TFSNYGITWVRQAPGQGLEWMGWISAYNGNTNYAQKFQGRVTMTRNTS |
| | | ISTAYMELSSLRSEDTAVYYCARGPYYYYMDVWGKGTMVTVSSASGGG |
| | | GSGGRASGGGGSEIVMTQSPLSLPVTPGEPASISCRSSQSLLYSNGYN |
| | | YVDWYLQKPGQSPQLLIYLGSNRASGVPDRFSGSGSGTDFKLQISRVE |
| | | AEDVGIYYCMQGRQFPYSFGQGTKVEIKTTTPAPRPPTPAPTIASQPL |
| | | SLRPEACRPAAGGAVHTRGLDFACDIYIWAPLAGTCGVLLLSLVITLY |
| | | CKRGRKKLLYIFKQPFMRPVQTTQEEDGCSCRFPEEEEGGCELRVKFS |
| | | RSADAPAYKQGQNQLYNELNLGRREEYDVLDKRRGRDPEMGGKPRRKN |
| | | PQEGLYNELQKDKMAEAYSEIGMKGERRRGKGHDGLYQGLSTATKDTY |
| | | DALHMQALPPR |
| 139102-nt | 1441 | ATGGCCCTCCCTGTCACCGCCCTGCTGCTTCCGCTGGCTCTTCTGCTC |
| Full CAR | | CACGCCGCTCGGCCCCAAGTCCAACTGGTCCAGAGCGGTGCAGAAGTG |
| | | AAGAAGCCCGGAGCGAGCGTGAAAGTGTCCTGCAAGGCTTCCGGGTAC |
| | | ACCTTCTCCAACTACGGCATCACTTGGGTGCGCCAGGCCCCGGGACAG |
| | | GGCCTGGAATGGATGGGGTGGATTTCCGCGTACAACGGCAATACGAAC |
| | | TACGCTCAGAAGTTCCAGGGTAGAGTGACCATGACTAGGAACACCTCC |
| | | ATTTCCACCGCCTACATGGAACTGTCCTCCCTGCGGAGCGAGGACACC |
| | | GCCGTGTACTATTGCGCCCGGGGACCATACTACTACTACATGGATGTC |
| | | TGGGGGAAGGGGACTATGGTCACCGTGTCATCCGCCTCGGGAGGCGGC |
| | | GGATCAGGAGGACGCGCCTCTGGTGGTGGAGGATCGGAGATCGTGATG |
| | | ACCCAGAGCCCTCTCTCCTTGCCCGTGACTCCTGGGGAGCCCGCATCC |
| | | ATTTCATGCCGGAGCTCCCAGTCACTTCTCTACTCCAACGGCTATAAC |
| | | TACGTGGATTGGTACCTCCAAAAGCCGGGCCAGAGCCCGCAGCTGCTG |
| | | ATCTACCTGGGCTCGAACAGGGCCAGCGGAGTGCCTGACCGGTTCTCC |
| | | GGGTCGGGAAGCGGGACCGACTTCAAGCTGCAAATCTCGAGAGTGGAG |
| | | GCCGAGGACGTGGGAATCTACTACTGTATGCAGGGCCGCCAGTTTCCG |
| | | TACTCGTTCGGACAGGGCACCAAAGTGGAAATCAAGACCACTACCCCA |
| | | GCACCGAGGCCACCCACCCCGGCTCCTACCATCGCCTCCCAGCCTCTG |
| | | TCCCTGCGTCCGGAGGCATGTAGACCCGCAGCTGGTGGGGCCGTGCAT |
| | | ACCCGGGGTCTTGACTTCGCCTGCGATATCTACATTTGGGCCCCTCTG |
| | | GCTGGTACTTGCGGGGTCCTGCTGCTTTCACTCGTGATCACTCTTTAC |
| | | TGTAAGCGCGGTCGGAAGAAGCTGCTGTACATCTTTAAGCAACCCTTC |
| | | ATGAGGCCTGTGCAGACTACTCAAGAGGAGGACGGCTGTTCATGCCGG |
| | | TTCCCAGAGGAGGAGGAAGGCGGCTGCGAACTGCGCGTGAAATTCAGC |
| | | CGCAGCGCAGATGCTCCAGCCTACAAGCAGGGGCAGAACCAGCTCTAC |
| | | AACGAACTCAATCTTGGTCGGAGAGAGGAGTACGACGTGCTGGACAAG |
| | | CGGAGAGGACGGGACCCAGAAATGGGCGGGAAGCCGCGCAGAAAGAAT |
| | | CCCCAAGAGGGCCTGTACAACGAGCTCCAAAAGGATAAGATGGCAGAA |
| | | GCCTATAGCGAGATTGGTATGAAAGGGGAACGCAGAAGAGGCAAAGGC |
| | | CACGACGGACTGTACCAGGGACTCAGCACCGCCACCAAGGACACCTAT |
| | | GACGCTCTTCACATGCAGGCCCTGCCGCCTCGG |

139104

| | | |
|---|---|---|
| 139104-aa | 1442 | EVQLLETGGGLVQPGGSLRLSCAVSGFALSNHGMSWVRRAPGKGLEWV |
| ScFv | | SGIVYSGSTYYAASVKGRFTISRDNSRNTLYLQMNSLRPEDTAIYYCS |
| domain | | AHGGESDVWGQGTTVTVSSASGGGGSGGRASGGGGSEIVLTQSPATLS |
| | | VSPGESATLSCRASQSVSSNLAWYQQKPGQAPRLLIYGASTRASGIPD |
| | | RFSGSGSGTDFTLTISSLQAEDVAVYYCQQYGSSLTFGGGTKVEIK |
| 139104-nt | 1443 | GAAGTGCAATTGCTCGAAACTGGAGGAGGTCTGGTGCAACCTGGAGGA |
| ScFv | | TCACTTCGCCTGTCCTGCGCCGTGTCGGGCTTTGCCCTGTCCAACCAT |
| domain | | GGAATGAGCTGGGTCCGCCGCGCGCCGGGGAAGGGCCTCGAATGGGTG |
| | | TCCGGCATCGTCTACTCCGGCTCCACCTACTACGCCGCGTCCGTGAAG |
| | | GGCCGGTTCACGATTTCACGGGACAACTCGCGGAACACCCTGTACCTC |
| | | CAAATGAATTCCCTTCGGCCGGAGGATACTGCCATCTACTACTGCTCC |
| | | GCCCACGGTGGCGAATCCGACGTCTGGGGCCAGGGAACCACCGTGACC |
| | | GTGTCCAGCGCGTCCGGGGGAGGAGGAAGCGGGGGTAGAGCATCGGGT |
| | | GGAGGCGGATCAGAGATCGTGCTGACCCAGTCCCCCGCCACCTTGAGC |
| | | GTGTCACCAGGAGAGTCCGCCACCCTGTCATGCCGCGCCAGCCAGTCC |
| | | GTGTCCTCCAACCTGGCTTGGTACCAGCAGAAGCCGGGGCAGGCCCCT |
| | | AGACTCCTGATCTATGGGGCGTCGACCCGGGCATCTGGAATTCCCGAT |
| | | AGGTTCAGCGGATCGGGCTCGGGCACTGACTTCACTCTGACCATCTCC |
| | | TCGCTGCAAGCCGAGGACGTGGCTGTGTACTACTGTCAGCAGTACGGA |
| | | AGCTCCCTGACTTTCGGTGGCGGGACCAAAGTCGAGATTAAG |
| 139104-aa | 1444 | EVQLLETGGGLVQPGGSLRLSCAVSGFALSNHGMSWVRRAPGKGLEWV |
| VH | | SGIVYSGSTYYAASVKGRFTISRDNSRNTLYLQMNSLRPEDTAIYYCS |
| | | AHGGESDVWGQGTTVTVSS |
| 139104-aa | 1445 | EIVLTQSPATLSVSPGESATLSCRASQSVSSNLAWYQQKPGQAPRLLI |
| VL | | YGASTRASGIPDRFSGSGSGTDFTLTISSLQAEDVAVYYCQQYGSSLT |
| | | FGGGTKVEIK |
| 139104-aa | 1446 | MALPVTALLLPLALLLHAARPEVQLLETGGGLVQPGGSLRLSCAVSGF |
| Full CAR | | ALSNHGMSWVRRAPGKGLEWVSGIVYSGSTYYAASVKGRFTISRDNSR |
| | | NTLYLQMNSLRPEDTAIYYCSAHGGESDVWGQGTTVTVSSASGGGGSG |
| | | GRASGGGGSEIVLTQSPATLSVSPGESATLSCRASQSVSSNLAWYQQK |
| | | PGQAPRLLIYGASTRASGIPDRFSGSGSGTDFTLTISSLQAEDVAVYY |
| | | CQQYGSSLTFGGGTKVEIKTTTPAPRPPTPAPTIASQPLSLRPEACRP |
| | | AAGGAVHTRGLDFACDIYIWAPLAGTCGVLLLSLVITLYCKRGRKKLL |
| | | YIFKQPFMRPVQTTQEEDGCSCRFPEEEEGGCELRVKFSRSADAPAYK |
| | | QGQNQLYNELNLGRREEYDVLDKRRGRDPEMGGKPRRKNPQEGLYNEL |
| | | QKDKMAEAYSEIGMKGERRRGKGHDGLYQGLSTATKDTYDALHMQALP |
| | | PR |
| 139104-nt | 1447 | ATGGCCCTCCCTGTCACCGCCCTGCTGCTTCCGCTGGCTCTTCTGCTC |
| Full CAR | | CACGCCGCTCGGCCCGAAGTGCAATTGCTCGAAACTGGAGGAGGTCTG |
| | | GTGCAACCTGGAGGATCACTTCGCCTGTCCTGCGCCGTGTCGGGCTTT |
| | | GCCCTGTCCAACCATGGAATGAGCTGGGTCCGCCGCGCGCCGGGGAAG |
| | | GGCCTCGAATGGGTGTCCGGCATCGTCTACTCCGGCTCCACCTACTAC |
| | | GCCGCGTCCGTGAAGGGCCGGTTCACGATTTCACGGGACAACTCGCGG |
| | | AACACCCTGTACCTCCAAATGAATTCCCTTCGGCCGGAGGATACTGCC |
| | | ATCTACTACTGCTCCGCCCACGGTGGCGAATCCGACGTCTGGGGCCAG |
| | | GGAACCACCGTGACCGTGTCCAGCGCGTCCGGGGGAGGAGGAAGCGGG |
| | | GGTAGAGCATCGGGTGGAGGCGGATCAGAGATCGTGCTGACCCAGTCC |
| | | CCCGCCACCTTGAGCGTGTCACCAGGAGAGTCCGCCACCCTGTCATGC |
| | | CGCGCCAGCCAGTCCGTGTCCTCCAACCTGGCTTGGTACCAGCAGAAG |
| | | CCGGGGCAGGCCCCTAGACTCCTGATCTATGGGGCGTCGACCCGGGCA |
| | | TCTGGAATTCCCGATAGGTTCAGCGGATCGGGCTCGGGCACTGACTTC |
| | | ACTCTGACCATCTCCTCGCTGCAAGCCGAGGACGTGGCTGTGTACTAC |
| | | TGTCAGCAGTACGGAAGCTCCCTGACTTTCGGTGGCGGGACCAAAGTC |
| | | GAGATTAAGACCACTACCCCAGCACCGAGGCCACCCACCCCGGCTCCT |
| | | ACCATCGCCTCCCAGCCTCTGTCCCTGCGTCCGGAGGCATGTAGACCC |
| | | GCAGCTGGTGGGGCCGTGCATACCCGGGGTCTTGACTTCGCCTGCGAT |
| | | ATCTACATTTGGGCCCCTCTGGCTGGTACTTGCGGGGTCCTGCTGCTT |
| | | TCACTCGTGATCACTCTTTACTGTAAGCGCGGTCGGAAGAAGCTGCTG |
| | | TACATCTTTAAGCAACCCTTCATGAGGCCTGTGCAGACTACTCAAGAG |
| | | GAGGACGGCTGTTCATGCCGGTTCCCAGAGGAGGAGGAAGGCGGCTGC |
| | | GAACTGCGCGTGAAATTCAGCCGCAGCGCAGATGCTCCAGCCTACAAG |
| | | CAGGGGCAGAACCAGCTCTACAACGAACTCAATCTTGGTCGGAGAGAG |
| | | GAGTACGACGTGCTGGACAAGCGGAGAGGACGGGACCCAGAAATGGGC |
| | | GGGAAGCCGCGCAGAAAGAATCCCCAAGAGGGCCTGTACAACGAGCTC |
| | | CAAAAGGATAAGATGGCAGAAGCCTATAGCGAGATTGGTATGAAAGGG |
| | | GAACGCAGAAGAGGCAAAGGCCACGACGGACTGTACCAGGGACTCAGC |
| | | ACCGCCACCAAGGACACCTATGACGCTCTTCACATGCAGGCCCTGCCG |
| | | CCTCGG |

139106

| | | |
|---|---|---|
| 139106-aa | 1448 | EVQLVETGGGLVQPGGSLRLSCAVSGFALSNHGMSWVRRAPGKGLEWV |
| ScFv | | SGIVYSGSTYYAASVKGRFTISRDNSRNTLYLQMNSLRPEDTAIYYCS |
| domain | | AHGGESDVWGQGTTVTVSSASGGGGSGGRASGGGGSEIVMTQSPATLS |
| | | VSPGERATLSCRASQSVSSKLAWYQQKPGQAPRLLMYGASIRATGIPD |
| | | RFSGSGSGTEFTLTISSLEPEDFAVYYCQQYGSSSWTFGQGTKVEIK |
| 139106-nt | 1449 | GAAGTGCAATTGGTGGAAACTGGAGGAGGACTTGTGCAACCTGGAGGA |
| ScFv | | TCATTGAGACTGAGCTGCGCAGTGTCGGGATTCGCCCTGAGCAACCAT |
| domain | | GGAATGTCCTGGGTCAGAAGGGCCCCTGGAAAAGGCCTCGAATGGGTG |
| | | TCAGGGATCGTGTACTCCGGTTCCACTTACTACGCCGCCTCCGTGAAG |
| | | GGGCGCTTCACTATCTCACGGGATAACTCCCGCAATACCCTGTACCTC |
| | | CAAATGAACAGCCTGCGGCCGGAGGATACCGCCATCTACTACTGTTCC |
| | | GCCCACGGTGGAGAGTCTGACGTCTGGGGCCAGGGAACTACCGTGACC |
| | | GTGTCCTCCGCGTCCGGCGGTGGAGGGAGCGGCGGCCGCGCCAGCGGC |
| | | GGCGGAGGCTCCGAGATCGTGATGACCCAGAGCCCCGCTACTCTGTCG |
| | | GTGTCGCCCGGAGAAAGGGCGACCCTGTCCTGCCGGGCGTCGCAGTCC |
| | | GTGAGCAGCAAGCTGGCTTGGTACCAGCAGAAGCCGGGCCAGGCACCA |
| | | CGCCTGCTTATGTACGGTGCCTCCATTCGGGCCACCGGAATCCCGGAC |
| | | CGGTTCTCGGGGTCGGGGTCCGGTACCGAGTTCACACTGACCATTTCC |
| | | TCGCTCGAGCCCGAGGACTTTGCCGTCTATTACTGCCAGCAGTACGGC |
| | | TCCTCCTCATGGACGTTCGGCCAGGGGACCAAGGTCGAAATCAAG |
| 139106-aa | 1450 | EVQLVETGGGLVQPGGSLRLSCAVSGFALSNHGMSWVRRAPGKGLEWV |
| VH | | SGIVYSGSTYYAASVKGRFTISRDNSRNTLYLQMNSLRPEDTAIYYCS |
| | | AHGGESDVWGQGTTVTVSS |
| 139106-aa | 1451 | EIVMTQSPATLSVSPGERATLSCRASQSVSSKLAWYQQKPGQAPRLLM |
| VL | | YGASIRATGIPDRFSGSGSGTEFTLTISSLEPEDFAVYYCQQYGSSSW |
| | | TFGQGTKVEIK |
| 139106-aa | 1452 | MALPVTALLLPLALLLHAARPEVQLVETGGGLVQPGGSLRLSCAVSGF |
| Full CAR | | ALSNHGMSWVRRAPGKGLEWVSGIVYSGSTYYAASVKGRFTISRDNSR |
| | | NTLYLQMNSLRPEDTAIYYCSAHGGESDVWGQGTTVTVSSASGGGGSG |
| | | GRASGGGGSEIVMTQSPATLSVSPGERATLSCRASQSVSSKLAWYQQK |
| | | PGQAPRLLMYGASIRATGIPDRFSGSGSGTEFTLTISSLEPEDFAVYY |
| | | CQQYGSSSWTFGQGTKVEIKTTTPAPRPPTPAPTIASQPLSLRPEACR |
| | | PAAGGAVHTRGLDFACDIYIWAPLAGTCGVLLLSLVITLYCKRGRKKL |
| | | LYIFKQPFMRPVQTTQEEDGCSCRFPEEEEGGCELRVKFSRSADAPAY |
| | | KQGQNQLYNELNLGRREEYDVLDKRRGRDPEMGGKPRRKNPQEGLYNE |
| | | LQKDKMAEAYSEIGMKGERRRGKGHDGLYQGLSTATKDTYDALHMQAL |
| | | PPR |
| 139106-nt | 1453 | ATGGCCCTCCCTGTCACCGCCCTGCTGCTTCCGCTGGCTCTTCTGCTC |
| Full CAR | | CACGCCGCTCGGCCCGAAGTGCAATTGGTGGAAACTGGAGGAGGACTT |
| | | GTGCAACCTGGAGGATCATTGAGACTGAGCTGCGCAGTGTCGGGATTC |
| | | GCCCTGAGCAACCATGGAATGTCCTGGGTCAGAAGGGCCCCTGGAAAA |
| | | GGCCTCGAATGGGTGTCAGGGATCGTGTACTCCGGTTCCACTTACTAC |
| | | GCCGCCTCCGTGAAGGGGCGCTTCACTATCTCACGGGATAACTCCCGC |
| | | AATACCCTGTACCTCCAAATGAACAGCCTGCGGCCGGAGGATACCGCC |
| | | ATCTACTACTGTTCCGCCCACGGTGGAGAGTCTGACGTCTGGGGCCAG |
| | | GGAACTACCGTGACCGTGTCCTCCGCGTCCGGCGGTGGAGGGAGCGGC |
| | | GGCCGCGCCAGCGGCGGCGGAGGCTCCGAGATCGTGATGACCCAGAGC |
| | | CCCGCTACTCTGTCGGTGTCGCCCGGAGAAAGGGCGACCCTGTCCTGC |
| | | CGGGCGTCGCAGTCCGTGAGCAGCAAGCTGGCTTGGTACCAGCAGAAG |
| | | CCGGGCCAGGCACCACGCCTGCTTATGTACGGTGCCTCCATTCGGGCC |
| | | ACCGGAATCCCGGACCGGTTCTCGGGGTCGGGGTCCGGTACCGAGTTC |
| | | ACACTGACCATTTCCTCGCTCGAGCCCGAGGACTTTGCCGTCTATTAC |
| | | TGCCAGCAGTACGGCTCCTCCTCATGGACGTTCGGCCAGGGGACCAAG |
| | | GTCGAAATCAAGACCACTACCCCAGCACCGAGGCCACCCACCCCGGCT |
| | | CCTACCATCGCCTCCCAGCCTCTGTCCCTGCGTCCGGAGGCATGTAGA |
| | | CCCGCAGCTGGTGGGGCCGTGCATACCCGGGGTCTTGACTTCGCCTGC |
| | | GATATCTACATTTGGGCCCCTCTGGCTGGTACTTGCGGGGTCCTGCTG |
| | | CTTTCACTCGTGATCACTCTTTACTGTAAGCGCGGTCGGAAGAAGCTG |
| | | CTGTACATCTTTAAGCAACCCTTCATGAGGCCTGTGCAGACTACTCAA |
| | | GAGGAGGACGGCTGTTCATGCCGGTTCCCAGAGGAGGAGGAAGGCGGC |
| | | TGCGAACTGCGCGTGAAATTCAGCCGCAGCGCAGATGCTCCAGCCTAC |
| | | AAGCAGGGGCAGAACCAGCTCTACAACGAACTCAATCTTGGTCGGAGA |
| | | GAGGAGTACGACGTGCTGGACAAGCGGAGAGGACGGGACCCAGAAATG |
| | | GGCGGGAAGCCGCGCAGAAAGAATCCCCAAGAGGGCCTGTACAACGAG |
| | | CTCCAAAAGGATAAGATGGCAGAAGCCTATAGCGAGATTGGTATGAAA |
| | | GGGGAACGCAGAAGAGGCAAAGGCCACGACGGACTGTACCAGGGACTC |
| | | AGCACCGCCACCAAGGACACCTATGACGCTCTTCACATGCAGGCCCTG |
| | | CCGCCTCGG |

139107

| | | |
|---|---|---|
| 139107-aa | 1454 | EVQLVETGGGVVQPGGSLRLSCAVSGFALSNHGMSWVRRAPGKGLEWV |
| ScFv | | SGIVYSGSTYYAASVKGRFTISRDNSRNTLYLQMNSLRPEDTAIYYCS |
| domain | | AHGGESDVWGQGTTVTVSSASGGGGSGGRASGGGGSEIVLTQSPGTLS |
| | | LSPGERATLSCRASQSVGSTNLAWYQQKPGQAPRLLIYDASNRATGIP |
| | | DRFSGGGSGTDFTLTISRLEPEDFAVYYCQQYGSSPPWTFGQGTKVEI |
| | | K |
| 139107-nt | 1455 | GAAGTGCAATTGGTGGAGACTGGAGGAGGAGTGGTGCAACCTGGAGGA |
| ScFv | | AGCCTGAGACTGTCATGCGCGGTGTCGGGCTTCGCCCTCTCCAACCAC |
| domain | | GGAATGTCCTGGGTCCGCCGGGCCCCTGGGAAAGGACTTGAATGGGTG |
| | | TCCGGCATCGTGTACTCGGGTTCCACCTACTACGCGGCCTCAGTGAAG |
| | | GGCCGGTTTACTATTAGCCGCGACAACTCCAGAAACACACTGTACCTC |
| | | CAAATGAACTCGCTGCGGCCGGAAGATACCGCTATCTACTACTGCTCC |
| | | GCCCATGGGGGAGAGTCGGACGTCTGGGGACAGGGCACCACTGTCACT |
| | | GTGTCCAGCGCTTCCGGCGGTGGTGGAAGCGGGGGACGGGCCTCAGGA |
| | | GGCGGTGGCAGCGAGATTGTGCTGACCCAGTCCCCCGGGACCCTGAGC |
| | | CTGTCCCCGGGAGAAAGGGCCACCCTCTCCTGTCGGGCATCCCAGTCC |
| | | GTGGGGTCTACTAACCTTGCATGGTACCAGCAGAAGCCCGGCCAGGCC |
| | | CCTCGCCTGCTGATCTACGACGCGTCCAATAGAGCCACCGGCATCCCG |
| | | GATCGCTTCAGCGGAGGCGGATCGGGCACCGACTTCACCCTCACCATT |
| | | TCAAGGCTGGAACCGGAGGACTTCGCCGTGTACTACTGCCAGCAGTAT |
| | | GGTTCGTCCCCACCCTGGACGTTCGGCCAGGGGACTAAGGTCGAGATC |
| | | AAG |
| 139107-aa | 1456 | EVQLVETGGGVVQPGGSLRLSCAVSGFALSNHGMSWVRRAPGKGLEWV |
| VH | | SGIVYSGSTYYAASVKGRFTISRDNSRNTLYLQMNSLRPEDTAIYYCS |
| | | AHGGESDVWGQGTTVTVSS |
| 139107-aa | 1457 | EIVLTQSPGTLSLSPGERATLSCRASQSVGSTNLAWYQQKPGQAPRLL |
| VL | | IYDASNRATGIPDRFSGGGSGTDFTLTISRLEPEDFAVYYCQQYGSSP |
| | | PWTFGQGTKVEIK |
| 139107-aa | 1458 | MALPVTALLLPLALLLHAARPEVQLVETGGGVVQPGGSLRLSCAVSGF |
| Full CAR | | ALSNHGMSWVRRAPGKGLEWVSGIVYSGSTYYAASVKGRFTISRDNSR |
| | | NTLYLQMNSLRPEDTAIYYCSAHGGESDVWGQGTTVTVSSASGGGGSG |
| | | GRASGGGGSEIVLTQSPGTLSLSPGERATLSCRASQSVGSTNLAWYQQ |
| | | KPGQAPRLLIYDASNRATGIPDRFSGGGSGTDFTLTISRLEPEDFAVY |
| | | YCQQYGSSPPWTFGQGTKVEIKTTTPAPRPPTPAPTIASQPLSLRPEA |
| | | CRPAAGGAVHTRGLDFACDIYIWAPLAGTCGVLLLSLVITLYCKRGRK |
| | | KLLYIFKQPFMRPVQTTQEEDGCSCRFPEEEEGGCELRVKFSRSADAP |
| | | AYKQGQNQLYNELNLGRREEYDVLDKRRGRDPEMGGKPRRKNPQEGLY |
| | | NELQKDKMAEAYSEIGMKGERRRGKGHDGLYQGLSTATKDTYDALHMQ |
| | | ALPPR |
| 139107-nt | 1459 | ATGGCCCTCCCTGTCACCGCCCTGCTGCTTCCGCTGGCTCTTCTGCTC |
| Full CAR | | CACGCCGCTCGGCCCGAAGTGCAATTGGTGGAGACTGGAGGAGGAGTG |
| | | GTGCAACCTGGAGGAAGCCTGAGACTGTCATGCGCGGTGTCGGGCTTC |
| | | GCCCTCTCCAACCACGGAATGTCCTGGGTCCGCCGGGCCCCTGGGAAA |
| | | GGACTTGAATGGGTGTCCGGCATCGTGTACTCGGGTTCCACCTACTAC |
| | | GCGGCCTCAGTGAAGGGCCGGTTTACTATTAGCCGCGACAACTCCAGA |
| | | AACACACTGTACCTCCAAATGAACTCGCTGCGGCCGGAAGATACCGCT |
| | | ATCTACTACTGCTCCGCCCATGGGGGAGAGTCGGACGTCTGGGGACAG |
| | | GGCACCACTGTCACTGTGTCCAGCGCTTCCGGCGGTGGTGGAAGCGGG |
| | | GGACGGGCCTCAGGAGGCGGTGGCAGCGAGATTGTGCTGACCCAGTCC |
| | | CCCGGGACCCTGAGCCTGTCCCCGGGAGAAAGGGCCACCCTCTCCTGT |
| | | CGGGCATCCCAGTCCGTGGGGTCTACTAACCTTGCATGGTACCAGCAG |
| | | AAGCCCGGCCAGGCCCCTCGCCTGCTGATCTACGACGCGTCCAATAGA |
| | | GCCACCGGCATCCCGGATCGCTTCAGCGGAGGCGGATCGGGCACCGAC |
| | | TTCACCCTCACCATTTCAAGGCTGGAACCGGAGGACTTCGCCGTGTAC |
| | | TACTGCCAGCAGTATGGTTCGTCCCCACCCTGGACGTTCGGCCAGGGG |
| | | ACTAAGGTCGAGATCAAGACCACTACCCCAGCACCGAGGCCACCCACC |
| | | CCGGCTCCTACCATCGCCTCCCAGCCTCTGTCCCTGCGTCCGGAGGCA |
| | | TGTAGACCCGCAGCTGGTGGGGCCGTGCATACCCGGGGTCTTGACTTC |
| | | GCCTGCGATATCTACATTTGGGCCCCTCTGGCTGGTACTTGCGGGGTC |
| | | CTGCTGCTTTCACTCGTGATCACTCTTTACTGTAAGCGCGGTCGGAAG |
| | | AAGCTGCTGTACATCTTTAAGCAACCCTTCATGAGGCCTGTGCAGACT |
| | | ACTCAAGAGGAGGACGGCTGTTCATGCCGGTTCCCAGAGGAGGAGGAA |
| | | GGCGGCTGCGAACTGCGCGTGAAATTCAGCCGCAGCGCAGATGCTCCA |
| | | GCCTACAAGCAGGGGCAGAACCAGCTCTACAACGAACTCAATCTTGGT |
| | | CGGAGAGAGGAGTACGACGTGCTGGACAAGCGGAGAGGACGGGACCCA |
| | | GAAATGGGCGGGAAGCCGCGCAGAAAGAATCCCCAAGAGGGCCTGTAC |
| | | AACGAGCTCCAAAAGGATAAGATGGCAGAAGCCTATAGCGAGATTGGT |
| | | ATGAAAGGGGAACGCAGAAGAGGCAAAGGCCACGACGGACTGTACCAG |
| | | GGACTCAGCACCGCCACCAAGGACACCTATGACGCTCTTCACATGCAG |
| | | GCCCTGCCGCCTCGG |

139108

| | | |
|---|---|---|
| 139108-aa | 1460 | QVQLVESGGGLVKPGGSLRLSCAASGFTFSDYYMSWIRQAPGKGLEWV |
| ScFv | | SYISSSGSTIYYADSVKGRFTISRDNAKNSLYLQMNSLRAEDTAVYYC |
| domain | | ARESGDGMDVWGQGTTVTVSSASGGGGSGGRASGGGGSDIQMTQSPSS |
| | | LSASVGDRVTITCRASQSISSYLNWYQQKPGKAPKLLIYAASSLQSGV |
| | | PSRFSGSGSGTDFTLTISSLQPEDFATYYCQQSYTLAFGQGTKVDIK |
| 139108-nt | 1461 | CAAGTGCAACTCGTGGAATCTGGTGGAGGACTCGTGAAACCTGGAGGA |
| ScFv | | TCATTGAGACTGTCATGCGCGGCCTCGGGATTCACGTTCTCCGATTAC |
| domain | | TACATGAGCTGGATTCGCCAGGCTCCGGGGAAGGGACTGGAATGGGTG |
| | | TCCTACATTTCCTCATCCGGCTCCACCATCTACTACGCGGACTCCGTG |
| | | AAGGGGAGATTCACCATTAGCCGCGATAACGCCAAGAACAGCCTGTAC |
| | | CTTCAGATGAACTCCCTGCGGGCTGAAGATACTGCCGTCTACTACTGC |
| | | GCAAGGGAGAGCGGAGATGGGATGGACGTCTGGGGACAGGGTACCACT |
| | | GTGACCGTGTCGTCGGCCTCCGGCGGAGGGGGTTCGGGTGGAAGGGCC |
| | | AGCGGCGGCGGAGGCAGCGACATCCAGATGACCCAGTCCCCCTCATCG |
| | | CTGTCCGCCTCCGTGGGCGACCGCGTCACCATCACATGCCGGGCCTCA |
| | | CAGTCGATCTCCTCCTACCTCAATTGGTATCAGCAGAAGCCCGGAAAG |
| | | GCCCCTAAGCTTCTGATCTACGCAGCGTCCTCCCTGCAATCCGGGGTC |
| | | CCATCTCGGTTCTCCGGCTCGGGCAGCGGTACCGACTTCACTCTGACC |
| | | ATCTCGAGCCTGCAGCCGGAGGACTTCGCCACTTACTACTGTCAGCAA |
| | | AGCTACACCCTCGCGTTTGGCCAGGGCACCAAAGTGGACATCAAG |
| 139108-aa | 1462 | QVQLVESGGGLVKPGGSLRLSCAASGFTFSDYYMSWIRQAPGKGLEWV |
| VH | | SYISSSGSTIYYADSVKGRFTISRDNAKNSLYLQMNSLRAEDTAVYYC |
| | | ARESGDGMDVWGQGTTVTVSS |
| 139108-aa | 1463 | DIQMTQSPSSLSASVGDRVTITCRASQSISSYLNWYQQKPGKAPKLLI |
| VL | | YAASSLQSGVPSRFSGSGSGTDFTLTISSLQPEDFATYYCQQSYTLAF |
| | | GQGTKVDIK |
| 139108-aa | 1464 | MALPVTALLLPLALLLHAARPQVQLVESGGGLVKPGGSLRLSCAASGF |
| Full CAR | | TFSDYYMSWIRQAPGKGLEWVSYISSSGSTIYYADSVKGRFTISRDNA |
| | | KNSLYLQMNSLRAEDTAVYYCARESGDGMDVWGQGTTVTVSSASGGGG |
| | | SGGRASGGGGSDIQMTQSPSSLSASVGDRVTITCRASQSISSYLNWYQ |
| | | QKPGKAPKLLIYAASSLQSGVPSRFSGSGSGTDFTLTISSLQPEDFAT |
| | | YYCQQSYTLAFGQGTKVDIKTTTPAPRPPTPAPTIASQPLSLRPEACR |
| | | PAAGGAVHTRGLDFACDIYIWAPLAGTCGVLLLSLVITLYCKRGRKKL |
| | | LYIFKQPFMRPVQTTQEEDGCSCRFPEEEEGGCELRVKFSRSADAPAY |
| | | KQGQNQLYNELNLGRREEYDVLDKRRGRDPEMGGKPRRKNPQEGLYNE |
| | | LQKDKMAEAYSEIGMKGERRRGKGHDGLYQGLSTATKDTYDALHMQAL |
| | | PPR |
| 139108-nt | 1465 | ATGGCCCTCCCTGTCACCGCCCTGCTGCTTCCGCTGGCTCTTCTGCTC |
| Full CAR | | CACGCCGCTCGGCCCCAAGTGCAACTCGTGGAATCTGGTGGAGGACTC |
| | | GTGAAACCTGGAGGATCATTGAGACTGTCATGCGCGGCCTCGGGATTC |
| | | ACGTTCTCCGATTACTACATGAGCTGGATTCGCCAGGCTCCGGGGAAG |
| | | GGACTGGAATGGGTGTCCTACATTTCCTCATCCGGCTCCACCATCTAC |
| | | TACGCGGACTCCGTGAAGGGGAGATTCACCATTAGCCGCGATAACGCC |
| | | AAGAACAGCCTGTACCTTCAGATGAACTCCCTGCGGGCTGAAGATACT |
| | | GCCGTCTACTACTGCGCAAGGGAGAGCGGAGATGGGATGGACGTCTGG |
| | | GGACAGGGTACCACTGTGACCGTGTCGTCGGCCTCCGGCGGAGGGGGT |
| | | TCGGGTGGAAGGGCCAGCGGCGGCGGAGGCAGCGACATCCAGATGACC |
| | | CAGTCCCCCTCATCGCTGTCCGCCTCCGTGGGCGACCGCGTCACCATC |
| | | ACATGCCGGGCCTCACAGTCGATCTCCTCCTACCTCAATTGGTATCAG |
| | | CAGAAGCCCGGAAAGGCCCCTAAGCTTCTGATCTACGCAGCGTCCTCC |
| | | CTGCAATCCGGGGTCCCATCTCGGTTCTCCGGCTCGGGCAGCGGTACC |
| | | GACTTCACTCTGACCATCTCGAGCCTGCAGCCGGAGGACTTCGCCACT |
| | | TACTACTGTCAGCAAAGCTACACCCTCGCGTTTGGCCAGGGCACCAAA |
| | | GTGGACATCAAGACCACTACCCCAGCACCGAGGCCACCCACCCCGGCT |
| | | CCTACCATCGCCTCCCAGCCTCTGTCCCTGCGTCCGGAGGCATGTAGA |
| | | CCCGCAGCTGGTGGGGCCGTGCATACCCGGGGTCTTGACTTCGCCTGC |
| | | GATATCTACATTTGGGCCCCTCTGGCTGGTACTTGCGGGGTCCTGCTG |
| | | CTTTCACTCGTGATCACTCTTTACTGTAAGCGCGGTCGGAAGAAGCTG |
| | | CTGTACATCTTTAAGCAACCCTTCATGAGGCCTGTGCAGACTACTCAA |
| | | GAGGAGGACGGCTGTTCATGCCGGTTCCCAGAGGAGGAGGAAGGCGGC |
| | | TGCGAACTGCGCGTGAAATTCAGCCGCAGCGCAGATGCTCCAGCCTAC |
| | | AAGCAGGGGCAGAACCAGCTCTACAACGAACTCAATCTTGGTCGGAGA |
| | | GAGGAGTACGACGTGCTGGACAAGCGGAGAGGACGGGACCCAGAAATG |
| | | GGCGGGAAGCCGCGCAGAAAGAATCCCCAAGAGGGCCTGTACAACGAG |
| | | CTCCAAAAGGATAAGATGGCAGAAGCCTATAGCGAGATTGGTATGAAA |
| | | GGGGAACGCAGAAGAGGCAAAGGCCACGACGGACTGTACCAGGGACTC |
| | | AGCACCGCCACCAAGGACACCTATGACGCTCTTCACATGCAGGCCCTG |
| | | CCGCCTCGG |

139110

| | | |
|---|---|---|
| 139110-aa | 1466 | QVQLVQSGGGLVKPGGSLRLSCAASGFTFSDYYMSWIRQAPGKGLEWV |
| ScFv | | SYISSSGNTIYYADSVKGRFTISRDNAKNSLYLQMNSLRAEDTAVYYC |
| domain | | ARSTMVREDYWGQGTLVTVSSASGGGGSGGRASGGGGSDIVLTQSPLS |
| | | LPVTLGQPASISCKSSESLVHNSGKTYLNWFHQRPGQSPRRLIYEVSN |
| | | RDSGVPDRFTGSGSGTDFTLKISRVEAEDVGVYYCMQGTHWPGTFGQG |
| | | TKLEIK |
| 139110-nt | 1467 | CAAGTGCAACTGGTGCAAAGCGGAGGAGGATTGGTCAAACCCGGAGGA |
| ScFv | | AGCCTGAGACTGTCATGCGCGGCCTCTGGATTCACCTTCTCCGATTAC |
| domain | | TACATGTCATGGATCAGACAGGCCCCGGGGAAGGGCCTCGAATGGGTG |
| | | TCCTACATCTCGTCCTCCGGGAACACCATCTACTACGCCGACAGCGTG |
| | | AAGGGCCGCTTTACCATTTCCCGCGACAACGCAAAGAACTCGCTGTAC |
| | | CTTCAGATGAATTCCCTGCGGGCTGAAGATACCGCGGTGTACTATTGC |
| | | GCCCGGTCCACTATGGTCCGGGAGGACTACTGGGGACAGGGCACACTC |
| | | GTGACCGTGTCCAGCGCGAGCGGGGGTGGAGGCAGCGGTGGACGCGCC |
| | | TCCGGCGGCGGCGGTTCAGACATCGTGCTGACTCAGTCGCCCCTGTCG |
| | | CTGCCGGTCACCCTGGGCCAACCGGCCTCAATTAGCTGCAAGTCCTCG |
| | | GAGAGCCTGGTGCACAACTCAGGAAAGACTTACCTGAACTGGTTCCAT |
| | | CAGCGGCCTGGACAGTCCCCACGGAGGCTCATCTATGAAGTGTCCAAC |
| | | AGGGATTCGGGGGTGCCCGACCGCTTCACTGGCTCCGGGTCCGGCACC |
| | | GACTTCACCTTGAAAATCTCCAGAGTGGAAGCCGAGGACGTGGGCGTG |
| | | TACTACTGTATGCAGGGTACCCACTGGCCTGGAACCTTTGGACAAGGA |
| | | ACTAAGCTCGAGATTAAG |
| 139110-aa | 1468 | QVQLVQSGGGLVKPGGSLRLSCAASGFTFSDYYMSWIRQAPGKGLEWV |
| VH | | SYISSSGNTIYYADSVKGRFTISRDNAKNSLYLQMNSLRAEDTAVYYC |
| | | ARSTMVREDYWGQGTLVTVSS |
| 139110-aa | 1469 | DIVLTQSPLSLPVTLGQPASISCKSSESLVHNSGKTYLNWFHQRPGQS |
| VL | | PRRLIYEVSNRDSGVPDRFTGSGSGTDFTLKISRVEAEDVGVYYCMQG |
| | | THWPGTFGQGTKLEIK |
| 139110-aa | 1470 | MALPVTALLLPLALLLHAARPQVQLVQSGGGLVKPGGSLRLSCAASGF |
| Full CAR | | TFSDYYMSWIRQAPGKGLEWVSYISSSGNTIYYADSVKGRFTISRDNA |
| | | KNSLYLQMNSLRAEDTAVYYCARSTMVREDYWGQGTLVTVSSASGGGG |
| | | SGGRASGGGGSDIVLTQSPLSLPVTLGQPASISCKSSESLVHNSGKTY |
| | | LNWFHQRPGQSPRRLIYEVSNRDSGVPDRFTGSGSGTDFTLKISRVEA |
| | | EDVGVYYCMQGTHWPGTFGQGTKLEIKTTTPAPRPPTPAPTIASQPLS |
| | | LRPEACRPAAGGAVHTRGLDFACDIYIWAPLAGTCGVLLLSLVITLYC |
| | | KRGRKKLLYIFKQPFMRPVQTTQEEDGCSCRFPEEEEGGCELRVKFSR |
| | | SADAPAYKQGQNQLYNELNLGRREEYDVLDKRRGRDPEMGGKPRRKNP |
| | | QEGLYNELQKDKMAEAYSEIGMKGERRRGKGHDGLYQGLSTATKDTYD |
| | | ALHMQALPPR |
| 139110-nt | 1471 | ATGGCCCTCCCTGTCACCGCCCTGCTGCTTCCGCTGGCTCTTCTGCTC |
| Full CAR | | CACGCCGCTCGGCCCCAAGTGCAACTGGTGCAAAGCGGAGGAGGATTG |
| | | GTCAAACCCGGAGGAAGCCTGAGACTGTCATGCGCGGCCTCTGGATTC |
| | | ACCTTCTCCGATTACTACATGTCATGGATCAGACAGGCCCCGGGGAAG |
| | | GGCCTCGAATGGGTGTCCTACATCTCGTCCTCCGGGAACACCATCTAC |
| | | TACGCCGACAGCGTGAAGGGCCGCTTTACCATTTCCCGCGACAACGCA |
| | | AAGAACTCGCTGTACCTTCAGATGAATTCCCTGCGGGCTGAAGATACC |
| | | GCGGTGTACTATTGCGCCCGGTCCACTATGGTCCGGGAGGACTACTGG |
| | | GGACAGGGCACACTCGTGACCGTGTCCAGCGCGAGCGGGGGTGGAGGC |
| | | AGCGGTGGACGCGCCTCCGGCGGCGGCGGTTCAGACATCGTGCTGACT |
| | | CAGTCGCCCCTGTCGCTGCCGGTCACCCTGGGCCAACCGGCCTCAATT |
| | | AGCTGCAAGTCCTCGGAGAGCCTGGTGCACAACTCAGGAAAGACTTAC |
| | | CTGAACTGGTTCCATCAGCGGCCTGGACAGTCCCCACGGAGGCTCATC |
| | | TATGAAGTGTCCAACAGGGATTCGGGGGTGCCCGACCGCTTCACTGGC |
| | | TCCGGGTCCGGCACCGACTTCACCTTGAAAATCTCCAGAGTGGAAGCC |
| | | GAGGACGTGGGCGTGTACTACTGTATGCAGGGTACCCACTGGCCTGGA |
| | | ACCTTTGGACAAGGAACTAAGCTCGAGATTAAGACCACTACCCCAGCA |
| | | CCGAGGCCACCCACCCCGGCTCCTACCATCGCCTCCCAGCCTCTGTCC |
| | | CTGCGTCCGGAGGCATGTAGACCCGCAGCTGGTGGGGCCGTGCATACC |
| | | CGGGGTCTTGACTTCGCCTGCGATATCTACATTTGGGCCCCTCTGGCT |
| | | GGTACTTGCGGGGTCCTGCTGCTTTCACTCGTGATCACTCTTTACTGT |
| | | AAGCGCGGTCGGAAGAAGCTGCTGTACATCTTTAAGCAACCCTTCATG |
| | | AGGCCTGTGCAGACTACTCAAGAGGAGGACGGCTGTTCATGCCGGTTC |
| | | CCAGAGGAGGAGGAAGGCGGCTGCGAACTGCGCGTGAAATTCAGCCGC |
| | | AGCGCAGATGCTCCAGCCTACAAGCAGGGGCAGAACCAGCTCTACAAC |
| | | GAACTCAATCTTGGTCGGAGAGAGGAGTACGACGTGCTGGACAAGCGG |
| | | AGAGGACGGGACCCAGAAATGGGCGGGAAGCCGCGCAGAAAGAATCCC |
| | | CAAGAGGGCCTGTACAACGAGCTCCAAAAGGATAAGATGGCAGAAGCC |
| | | TATAGCGAGATTGGTATGAAAGGGGAACGCAGAAGAGGCAAAGGCCAC |
| | | GACGGACTGTACCAGGGACTCAGCACCGCCACCAAGGACACCTATGAC |
| | | GCTCTTCACATGCAGGCCCTGCCGCCTCGG |

139112

| | | |
|---|---|---|
| 139112-aa | 1472 | QVQLVESGGGLVQPGGSLRLSCAVSGFALSNHGMSWVRRAPGKGLEWV |
| ScFv | | SGIVYSGSTYYAASVKGRFTISRDNSRNTLYLQMNSLRPEDTAIYYCS |
| domain | | AHGGESDVWGQGTTVTVSSASGGGGSGGRASGGGGSDIRLTQSPSPLS |
| | | ASVGDRVTITCQASEDINKFLNWYHQTPGKAPKLLIYDASTLQTGVPS |
| | | RFSGSGSGTDFTLTINSLQPEDIGTYYCQQYESLPLTFGGGTKVEIK |
| 139112-nt | 1473 | CAAGTGCAACTCGTGGAATCTGGTGGAGGACTCGTGCAACCCGGTGGA |
| ScFv | | AGCCTTAGGCTGTCGTGCGCCGTCAGCGGGTTTGCTCTGAGCAACCAT |
| domain | | GGAATGTCCTGGGTCCGCCGGGCACCGGGAAAAGGGCTGGAATGGGTG |
| | | TCCGGCATCGTGTACAGCGGGTCAACCTATTACGCCGCGTCCGTGAAG |
| | | GGCAGATTCACTATCTCAAGAGACAACAGCCGGAACACCCTGTACTTG |
| | | CAAATGAATTCCCTGCGCCCCGAGGACACCGCCATCTACTACTGCTCC |
| | | GCCCACGGAGGAGAGTCGGACGTGTGGGGCCAGGGAACGACTGTGACT |
| | | GTGTCCAGCGCATCAGGAGGGGGTGGTTCGGGCGGCCGGGCCTCGGGG |
| | | GGAGGAGGTTCCGACATTCGGCTGACCCAGTCCCCGTCCCCACTGTCG |
| | | GCCTCCGTCGGCGACCGCGTGACCATCACTTGTCAGGCGTCCGAGGAC |
| | | ATTAACAAGTTCCTGAACTGGTACCACCAGACCCCTGGAAAGGCCCCC |
| | | AAGCTGCTGATCTACGATGCCTCGACCCTTCAAACTGGAGTGCCTAGC |
| | | CGGTTCTCCGGGTCCGGCTCCGGCACTGATTTCACTCTGACCATCAAC |
| | | TCATTGCAGCCGGAAGATATCGGGACCTACTATTGCCAGCAGTACGAA |
| | | TCCCTCCCGCTCACATTCGGCGGGGGAACCAAGGTCGAGATTAAG |
| 139112-aa | 1474 | QVQLVESGGGLVQPGGSLRLSCAVSGFALSNHGMSWVRRAPGKGLEWV |
| VH | | SGIVYSGSTYYAASVKGRFTISRDNSRNTLYLQMNSLRPEDTAIYYCS |
| | | AHGGESDVWGQGTTVTVSS |
| 139112-aa | 1475 | DIRLTQSPSPLSASVGDRVTITCQASEDINKFLNWYHQTPGKAPKLLI |
| VL | | YDASTLQTGVPSRFSGSGSGTDFTLTINSLQPEDIGTYYCQQYESLPL |
| | | TFGGGTKVEIK |
| 139112-aa | 1476 | MALPVTALLLPLALLLHAARPQVQLVESGGGLVQPGGSLRLSCAVSGF |
| Full CAR | | ALSNHGMSWVRRAPGKGLEWVSGIVYSGSTYYAASVKGRFTISRDNSR |
| | | NTLYLQMNSLRPEDTAIYYCSAHGGESDVWGQGTTVTVSSASGGGGSG |
| | | GRASGGGGSDIRLTQSPSPLSASVGDRVTITCQASEDINKFLNWYHQT |
| | | PGKAPKLLIYDASTLQTGVPSRFSGSGSGTDFTLTINSLQPEDIGTYY |
| | | CQQYESLPLTFGGGTKVEIKTTTPAPRPPTPAPTIASQPLSLRPEACR |
| | | PAAGGAVHTRGLDFACDIYIWAPLAGTCGVLLLSLVITLYCKRGRKKL |
| | | LYIFKQPFMRPVQTTQEEDGCSCRFPEEEEGGCELRVKFSRSADAPAY |
| | | KQGQNQLYNELNLGRREEYDVLDKRRGRDPEMGGKPRRKNPQEGLYNE |
| | | LQKDKMAEAYSEIGMKGERRRGKGHDGLYQGLSTATKDTYDALHMQAL |
| | | PPR |
| 139112-nt | 1477 | ATGGCCCTCCCTGTCACCGCCCTGCTGCTTCCGCTGGCTCTTCTGCTC |
| Full CAR | | CACGCCGCTCGGCCCCAAGTGCAACTCGTGGAATCTGGTGGAGGACTC |
| | | GTGCAACCCGGTGGAAGCCTTAGGCTGTCGTGCGCCGTCAGCGGGTTT |
| | | GCTCTGAGCAACCATGGAATGTCCTGGGTCCGCCGGGCACCGGGAAAA |
| | | GGGCTGGAATGGGTGTCCGGCATCGTGTACAGCGGGTCAACCTATTAC |
| | | GCCGCGTCCGTGAAGGGCAGATTCACTATCTCAAGAGACAACAGCCGG |
| | | AACACCCTGTACTTGCAAATGAATTCCCTGCGCCCCGAGGACACCGCC |
| | | ATCTACTACTGCTCCGCCCACGGAGGAGAGTCGGACGTGTGGGGCCAG |
| | | GGAACGACTGTGACTGTGTCCAGCGCATCAGGAGGGGGTGGTTCGGGC |
| | | GGCCGGGCCTCGGGGGGAGGAGGTTCCGACATTCGGCTGACCCAGTCC |
| | | CCGTCCCCACTGTCGGCCTCCGTCGGCGACCGCGTGACCATCACTTGT |
| | | CAGGCGTCCGAGGACATTAACAAGTTCCTGAACTGGTACCACCAGACC |
| | | CCTGGAAAGGCCCCCAAGCTGCTGATCTACGATGCCTCGACCCTTCAA |
| | | ACTGGAGTGCCTAGCCGGTTCTCCGGGTCCGGCTCCGGCACTGATTTC |
| | | ACTCTGACCATCAACTCATTGCAGCCGGAAGATATCGGGACCTACTAT |
| | | TGCCAGCAGTACGAATCCCTCCCGCTCACATTCGGCGGGGGAACCAAG |
| | | GTCGAGATTAAGACCACTACCCCAGCACCGAGGCCACCCACCCCGGCT |
| | | CCTACCATCGCCTCCCAGCCTCTGTCCCTGCGTCCGGAGGCATGTAGA |
| | | CCCGCAGCTGGTGGGGCCGTGCATACCCGGGGTCTTGACTTCGCCTGC |
| | | GATATCTACATTTGGGCCCCTCTGGCTGGTACTTGCGGGGTCCTGCTG |
| | | CTTTCACTCGTGATCACTCTTTACTGTAAGCGCGGTCGGAAGAAGCTG |
| | | CTGTACATCTTTAAGCAACCCTTCATGAGGCCTGTGCAGACTACTCAA |
| | | GAGGAGGACGGCTGTTCATGCCGGTTCCCAGAGGAGGAGGAAGGCGGC |
| | | TGCGAACTGCGCGTGAAATTCAGCCGCAGCGCAGATGCTCCAGCCTAC |
| | | AAGCAGGGGCAGAACCAGCTCTACAACGAACTCAATCTTGGTCGGAGA |
| | | GAGGAGTACGACGTGCTGGACAAGCGGAGAGGACGGGACCCAGAAATG |
| | | GGCGGGAAGCCGCGCAGAAAGAATCCCCAAGAGGGCCTGTACAACGAG |
| | | CTCCAAAAGGATAAGATGGCAGAAGCCTATAGCGAGATTGGTATGAAA |
| | | GGGGAACGCAGAAGAGGCAAAGGCCACGACGGACTGTACCAGGGACTC |
| | | AGCACCGCCACCAAGGACACCTATGACGCTCTTCACATGCAGGCCCTG |
| | | CCGCCTCGG |

139113

| | | |
|---|---|---|
| 139113-aa | 1478 | EVQLVETGGGLVQPGGSLRLSCAVSGFALSNHGMSWVRRAPGKGLEWV |
| ScFv | | SGIVYSGSTYYAASVKGRFTISRDNSRNTLYLQMNSLRPEDTAIYYCS |
| domain | | AHGGESDVWGQGTTVTVSSASGGGGSGGRASGGGGSETTLTQSPATLS |
| | | VSPGERATLSCRASQSVGSNLAWYQQKPGQGPRLLIYGASTRATGIPA |
| | | RFSGSGSGTEFTLTISSLQPEDFAVYYCQQYNDWLPVTFGQGTKVEIK |
| 139113-nt | 1480 | GAAGTGCAATTGGTGGAAACTGGAGGAGGACTTGTGCAACCTGGAGGA |
| ScFv | | TCATTGCGGCTCTCATGCGCTGTCTCCGGCTTCGCCCTGTCAAATCAC |
| domain | | GGGATGTCGTGGGTCAGACGGGCCCCGGGAAAGGGTCTGGAATGGGTG |
| | | TCGGGGATTGTGTACAGCGGCTCCACCTACTACGCCGCTTCGGTCAAG |
| | | GGCCGCTTCACTATTTCACGGGACAACAGCCGCAACACCCTCTATCTG |
| | | CAAATGAACTCTCTCCGCCCGGAGGATACCGCCATCTACTACTGCTCC |
| | | GCACACGGCGGCGAATCCGACGTGTGGGGACAGGGAACCACTGTCACC |
| | | GTGTCGTCCGCATCCGGTGGCGGAGGATCGGGTGGCCGGGCCTCCGGG |
| | | GGCGGCGGCAGCGAGACTACCCTGACCCAGTCCCCTGCCACTCTGTCC |
| | | GTGAGCCCGGGAGAGAGAGCCACCCTTAGCTGCCGGGCCAGCCAGAGC |
| | | GTGGGCTCCAACCTGGCCTGGTACCAGCAGAAGCCAGGACAGGGTCCC |
| | | AGGCTGCTGATCTACGGAGCCTCCACTCGCGCGACCGGCATCCCCGCG |
| | | AGGTTCTCCGGGTCGGGTTCCGGGACCGAGTTCACCCTGACCATCTCC |
| | | TCCCTCCAACCGGAGGACTTCGCGGTGTACTACTGTCAGCAGTACAAC |
| | | GATTGGCTGCCCGTGACATTTGGACAGGGGACGAAGGTGGAAATCAAA |
| 139113-aa | 1481 | EVQLVETGGGLVQPGGSLRLSCAVSGFALSNHGMSWVRRAPGKGLEWV |
| VH | | SGIVYSGSTYYAASVKGRFTISRDNSRNTLYLQMNSLRPEDTAIYYCS |
| | | AHGGESDVWGQGTTVTVSS |
| 139113-aa | 1482 | ETTLTQSPATLSVSPGERATLSCRASQSVGSNLAWYQQKPGQGPRLLI |
| VL | | YGASTRATGIPARFSGSGSGTEFTLTISSLQPEDFAVYYCQQYNDWLP |
| | | VTFGQGTKVEIK |
| 139113-aa | 1483 | MALPVTALLLPLALLLHAARPEVQLVETGGGLVQPGGSLRLSCAVSGF |
| Full CAR | | ALSNHGMSWVRRAPGKGLEWVSGIVYSGSTYYAASVKGRFTISRDNSR |
| | | NTLYLQMNSLRPEDTAIYYCSAHGGESDVWGQGTTVTVSSASGGGGSG |
| | | GRASGGGGSETTLTQSPATLSVSPGERATLSCRASQSVGSNLAWYQQK |
| | | PGQGPRLLIYGASTRATGIPARFSGSGSGTEFTLTISSLQPEDFAVYY |
| | | CQQYNDWLPVTFGQGTKVEIKTTTPAPRPPTPAPTIASQPLSLRPEAC |
| | | RPAAGGAVHTRGLDFACDIYIWAPLAGTCGVLLLSLVITLYCKRGRKK |
| | | LLYIFKQPFMRPVQTTQEEDGCSCRFPEEEEGGCELRVKFSRSADAPA |
| | | YKQGQNQLYNELNLGRREEYDVLDKRRGRDPEMGGKPRRKNPQEGLYN |
| | | ELQKDKMAEAYSEIGMKGERRRGKGHDGLYQGLSTATKDTYDALHMQA |
| | | LPPR |
| 139113-nt | 1484 | ATGGCCCTCCCTGTCACCGCCCTGCTGCTTCCGCTGGCTCTTCTGCTC |
| Full CAR | | CACGCCGCTCGGCCCGAAGTGCAATTGGTGGAAACTGGAGGAGGACTT |
| | | GTGCAACCTGGAGGATCATTGCGGCTCTCATGCGCTGTCTCCGGCTTC |
| | | GCCCTGTCAAATCACGGGATGTCGTGGGTCAGACGGGCCCCGGGAAAG |
| | | GGTCTGGAATGGGTGTCGGGGATTGTGTACAGCGGCTCCACCTACTAC |
| | | GCCGCTTCGGTCAAGGGCCGCTTCACTATTTCACGGGACAACAGCCGC |
| | | AACACCCTCTATCTGCAAATGAACTCTCTCCGCCCGGAGGATACCGCC |
| | | ATCTACTACTGCTCCGCACACGGCGGCGAATCCGACGTGTGGGGACAG |
| | | GGAACCACTGTCACCGTGTCGTCCGCATCCGGTGGCGGAGGATCGGGT |
| | | GGCCGGGCCTCCGGGGGCGGCGGCAGCGAGACTACCCTGACCCAGTCC |
| | | CCTGCCACTCTGTCCGTGAGCCCGGGAGAGAGAGCCACCCTTAGCTGC |
| | | CGGGCCAGCCAGAGCGTGGGCTCCAACCTGGCCTGGTACCAGCAGAAG |
| | | CCAGGACAGGGTCCCAGGCTGCTGATCTACGGAGCCTCCACTCGCGCG |
| | | ACCGGCATCCCCGCGAGGTTCTCCGGGTCGGGTTCCGGGACCGAGTTC |
| | | ACCCTGACCATCTCCTCCCTCCAACCGGAGGACTTCGCGGTGTACTAC |
| | | TGTCAGCAGTACAACGATTGGCTGCCCGTGACATTTGGACAGGGGACG |
| | | AAGGTGGAAATCAAAACCACTACCCCAGCACCGAGGCCACCCACCCCG |
| | | GCTCCTACCATCGCCTCCCAGCCTCTGTCCCTGCGTCCGGAGGCATGT |
| | | AGACCCGCAGCTGGTGGGGCCGTGCATACCCGGGGTCTTGACTTCGCC |
| | | TGCGATATCTACATTTGGGCCCCTCTGGCTGGTACTTGCGGGGTCCTG |
| | | CTGCTTTCACTCGTGATCACTCTTTACTGTAAGCGCGGTCGGAAGAAG |
| | | CTGCTGTACATCTTTAAGCAACCCTTCATGAGGCCTGTGCAGACTACT |
| | | CAAGAGGAGGACGGCTGTTCATGCCGGTTCCCAGAGGAGGAGGAAGGC |
| | | GGCTGCGAACTGCGCGTGAAATTCAGCCGCAGCGCAGATGCTCCAGCC |
| | | TACAAGCAGGGGCAGAACCAGCTCTACAACGAACTCAATCTTGGTCGG |
| | | AGAGAGGAGTACGACGTGCTGGACAAGCGGAGAGGACGGGACCCAGAA |
| | | ATGGGCGGGAAGCCGCGCAGAAAGAATCCCCAAGAGGGCCTGTACAAC |
| | | GAGCTCCAAAAGGATAAGATGGCAGAAGCCTATAGCGAGATTGGTATG |
| | | AAAGGGGAACGCAGAAGAGGCAAAGGCCACGACGGACTGTACCAGGGA |
| | | CTCAGCACCGCCACCAAGGACACCTATGACGCTCTTCACATGCAGGCC |
| | | CTGCCGCCTCGG |

139114

| | | |
|---|---|---|
| 139114-aa | 1485 | EVQLVESGGGLVQPGGSLRLSCAVSGFALSNHGMSWVRRAPGKGLEWV |
| ScFv | | SGIVYSGSTYYAASVKGRFTISRDNSRNTLYLQMNSLRPEDTAIYYCS |
| domain | | AHGGESDVWGQGTTVTVSSASGGGGSGGRASGGGGSEIVLTQSPGTLS |
| | | LSPGERATLSCRASQSIGSSSLAWYQQKPGQAPRLLMYGASSRASGIP |
| | | DRFSGSGSGTDFTLTISRLEPEDFAVYYCQQYAGSPPFTFGQGTKVEI |
| | | K |
| 139114-nt | 1486 | GAAGTGCAATTGGTGGAATCTGGTGGAGGACTTGTGCAACCTGGAGGA |
| ScFv | | TCACTGAGACTGTCATGCGCGGTGTCCGGTTTTGCCCTGAGCAATCAT |
| domain | | GGGATGTCGTGGGTCCGGCGCGCCCCCGGAAAGGGTCTGGAATGGGTG |
| | | TCGGGTATCGTCTACTCCGGGAGCACTTACTACGCCGCGAGCGTGAAG |
| | | GGCCGCTTCACCATTTCCCGCGATAACTCCCGCAACACCCTGTACTTG |
| | | CAAATGAACTCGCTCCGGCCTGAGGACACTGCCATCTACTACTGCTCC |
| | | GCACACGGAGGAGAATCCGACGTGTGGGGCCAGGGAACTACCGTGACC |
| | | GTCAGCAGCGCCTCCGGCGGCGGGGGCTCAGGCGGACGGGCTAGCGGC |
| | | GGCGGTGGCTCCGAGATCGTGCTGACCCAGTCGCCTGGCACTCTCTCG |
| | | CTGAGCCCCGGGGAAAGGGCAACCCTGTCCTGTCGGGCCAGCCAGTCC |
| | | ATTGGATCATCCTCCCTCGCCTGGTATCAGCAGAAACCGGGACAGGCT |
| | | CCGCGGCTGCTTATGTATGGGGCCAGCTCAAGAGCCTCCGGCATTCCC |
| | | GACCGGTTCTCCGGGTCCGGTTCCGGCACCGATTTCACCCTGACTATC |
| | | TCGAGGCTGGAGCCAGAGGACTTCGCCGTGTACTACTGCCAGCAGTAC |
| | | GCGGGGTCCCCGCCGTTCACGTTCGGACAGGGAACCAAGGTCGAGATC |
| | | AAG |
| 139114-aa | 1487 | EVQLVESGGGLVQPGGSLRLSCAVSGFALSNHGMSWVRRAPGKGLEWV |
| VH | | SGIVYSGSTYYAASVKGRFTISRDNSRNTLYLQMNSLRPEDTAIYYCS |
| | | AHGGESDVWGQGTTVTVSS |
| 139114-aa | 1488 | EIVLTQSPGTLSLSPGERATLSCRASQSIGSSSLAWYQQKPGQAPRLL |
| VL | | MYGASSRASGIPDRFSGSGSGTDFTLTISRLEPEDFAVYYCQQYAGSP |
| | | PFTFGQGTKVEIK |
| 139114-aa | 1489 | MALPVTALLLPLALLLHAARPEVQLVESGGGLVQPGGSLRLSCAVSGF |
| Full CAR | | ALSNHGMSWVRRAPGKGLEWVSGIVYSGSTYYAASVKGRFTISRDNSR |
| | | NTLYLQMNSLRPEDTAIYYCSAHGGESDVWGQGTTVTVSSASGGGGSG |
| | | GRASGGGGSEIVLTQSPGTLSLSPGERATLSCRASQSIGSSSLAWYQQ |
| | | KPGQAPRLLMYGASSRASGIPDRFSGSGSGTDFTLTISRLEPEDFAVY |
| | | YCQQYAGSPPFTFGQGTKVEIKTTTPAPRPPTPAPTIASQPLSLRPEA |
| | | CRPAAGGAVHTRGLDFACDIYIWAPLAGTCGVLLLSLVITLYCKRGRK |
| | | KLLYIFKQPFMRPVQTTQEEDGCSCRFPEEEEGGCELRVKFSRSADAP |
| | | AYKQGQNQLYNELNLGRREEYDVLDKRRGRDPEMGGKPRRKNPQEGLY |
| | | NELQKDKMAEAYSEIGMKGERRRGKGHDGLYQGLSTATKDTYDALHMQ |
| | | ALPPR |
| 139114-nt | 1490 | ATGGCCCTCCCTGTCACCGCCCTGCTGCTTCCGCTGGCTCTTCTGCTC |
| Full CAR | | CACGCCGCTCGGCCCGAAGTGCAATTGGTGGAATCTGGTGGAGGACTT |
| | | GTGCAACCTGGAGGATCACTGAGACTGTCATGCGCGGTGTCCGGTTTT |
| | | GCCCTGAGCAATCATGGGATGTCGTGGGTCCGGCGCGCCCCCGGAAAG |
| | | GGTCTGGAATGGGTGTCGGGTATCGTCTACTCCGGGAGCACTTACTAC |
| | | GCCGCGAGCGTGAAGGGCCGCTTCACCATTTCCCGCGATAACTCCCGC |
| | | AACACCCTGTACTTGCAAATGAACTCGCTCCGGCCTGAGGACACTGCC |
| | | ATCTACTACTGCTCCGCACACGGAGGAGAATCCGACGTGTGGGGCCAG |
| | | GGAACTACCGTGACCGTCAGCAGCGCCTCCGGCGGCGGGGGCTCAGGC |
| | | GGACGGGCTAGCGGCGGCGGTGGCTCCGAGATCGTGCTGACCCAGTCG |
| | | CCTGGCACTCTCTCGCTGAGCCCCGGGGAAAGGGCAACCCTGTCCTGT |
| | | CGGGCCAGCCAGTCCATTGGATCATCCTCCCTCGCCTGGTATCAGCAG |
| | | AAACCGGGACAGGCTCCGCGGCTGCTTATGTATGGGGCCAGCTCAAGA |
| | | GCCTCCGGCATTCCCGACCGGTTCTCCGGGTCCGGTTCCGGCACCGAT |
| | | TTCACCCTGACTATCTCGAGGCTGGAGCCAGAGGACTTCGCCGTGTAC |
| | | TACTGCCAGCAGTACGCGGGGTCCCCGCCGTTCACGTTCGGACAGGGA |
| | | ACCAAGGTCGAGATCAAGACCACTACCCCAGCACCGAGGCCACCCACC |
| | | CCGGCTCCTACCATCGCCTCCCAGCCTCTGTCCCTGCGTCCGGAGGCA |
| | | TGTAGACCCGCAGCTGGTGGGGCCGTGCATACCCGGGGTCTTGACTTC |
| | | GCCTGCGATATCTACATTTGGGCCCCTCTGGCTGGTACTTGCGGGGTC |
| | | CTGCTGCTTTCACTCGTGATCACTCTTTACTGTAAGCGCGGTCGGAAG |
| | | AAGCTGCTGTACATCTTTAAGCAACCCTTCATGAGGCCTGTGCAGACT |
| | | ACTCAAGAGGAGGACGGCTGTTCATGCCGGTTCCCAGAGGAGGAGGAA |
| | | GGCGGCTGCGAACTGCGCGTGAAATTCAGCCGCAGCGCAGATGCTCCA |
| | | GCCTACAAGCAGGGGCAGAACCAGCTCTACAACGAACTCAATCTTGGT |
| | | CGGAGAGAGGAGTACGACGTGCTGGACAAGCGGAGAGGACGGGACCCA |
| | | GAAATGGGCGGGAAGCCGCGCAGAAAGAATCCCCAAGAGGGCCTGTAC |
| | | AACGAGCTCCAAAAGGATAAGATGGCAGAAGCCTATAGCGAGATTGGT |
| | | ATGAAAGGGGAACGCAGAAGAGGCAAAGGCCACGACGGACTGTACCAG |
| | | GGACTCAGCACCGCCACCAAGGACACCTATGACGCTCTTCACATGCAG |
| | | GCCCTGCCGCCTCGG |

149362

| | | |
|---|---|---|
| 149362-aa | 1491 | QVQLQESGPGLVKPSETLSLTCTVSGGSISSSYYYWGWIRQPPGKGLE |
| ScFv | | WIGSIYYSGSAYYNPSLKSRVTISVDTSKNQFSLRLSSVTAADTAVYY |
| domain | | CARHWQEWPDAFDIWGQGTMVTVSSGGGGSGGGGSGGGGSETTLTQSP |
| | | AFMSATPGDKVIISCKASQDIDDAMNWYQQKPGEAPLFIIQSATSPVP |
| | | GIPPRFSGSGFGTDFSLTINNIESEDAAYYFCLQHDNFPLTFGQGTKL |
| | | EIK |
| 149362-nt | 1492 | CAAGTGCAGCTTCAGGAAAGCGGACCGGGCCTGGTCAAGCCATCCGAA |
| ScFv | | ACTCTCTCCCTGACTTGCACTGTGTCTGGCGGTTCCATCTCATCGTCG |
| domain | | TACTACTACTGGGGCTGGATTAGGCAGCCGCCCGGAAAGGGACTGGAG |
| | | TGGATCGGAAGCATCTACTATTCCGGCTCGGCGTACTACAACCCTAGC |
| | | CTCAAGTCGAGAGTGACCATCTCCGTGGATACCTCCAAGAACCAGTTT |
| | | TCCCTGCGCCTGAGCTCCGTGACCGCCGCTGACACCGCCGTGTACTAC |
| | | TGTGCTCGGCATTGGCAGGAATGGCCCGATGCCTTCGACATTTGGGGC |
| | | CAGGGCACTATGGTCACTGTGTCATCCGGGGGTGGAGGCAGCGGGGGA |
| | | GGAGGGTCCGGGGGGGGAGGTTCAGAGACAACCTTGACCCAGTCACCC |
| | | GCATTCATGTCCGCCACTCCGGGAGACAAGGTCATCATCTCGTGCAAA |
| | | GCGTCCCAGGATATCGACGATGCCATGAATTGGTACCAGCAGAAGCCT |
| | | GGCGAAGCGCCGCTGTTCATTATCCAATCCGCAACCTCGCCCGTGCCT |
| | | GGAATCCCACCGCGGTTCAGCGGCAGCGGTTTCGGAACCGACTTTTCC |
| | | CTGACCATTAACAACATTGAGTCCGAGGACGCCGCCTACTACTTCTGC |
| | | CTGCAACACGACAACTTCCCTCTCACGTTCGGCCAGGGAACCAAGCTG |
| | | GAAATCAAG |
| 149362-aa | 1493 | QVQLQESGPGLVKPSETLSLTCTVSGGSISSSYYYWGWIRQPPGKGLE |
| VH | | WIGSIYYSGSAYYNPSLKSRVTISVDTSKNQFSLRLSSVTAADTAVYY |
| | | CARHWQEWPDAFDIWGQGTMVTVSS |
| 149362-aa | 1494 | ETTLTQSPAFMSATPGDKVIISCKASQDIDDAMNWYQQKPGEAPLFII |
| VL | | QSATSPVPGIPPRFSGSGFGTDFSLTINNIESEDAAYYFCLQHDNFPL |
| | | TFGQGTKLEIK |
| 149362-aa | 1495 | MALPVTALLLPLALLLHAARPQVQLQESGPGLVKPSETLSLTCTVSGG |
| Full CAR | | SISSSYYYWGWIRQPPGKGLEWIGSIYYSGSAYYNPSLKSRVTISVDT |
| | | SKNQFSLRLSSVTAADTAVYYCARHWQEWPDAFDIWGQGTMVTVSSGG |
| | | GGSGGGGSGGGGSETTLTQSPAFMSATPGDKVIISCKASQDIDDAMNW |
| | | YQQKPGEAPLFIIQSATSPVPGIPPRFSGSGFGTDFSLTINNIESEDA |
| | | AYYFCLQHDNFPLTFGQGTKLEIKTTTPAPRPPTPAPTIASQPLSLRP |
| | | EACRPAAGGAVHTRGLDFACDIYIWAPLAGTCGVLLLSLVITLYCKRG |
| | | RKKLLYIFKQPFMRPVQTTQEEDGCSCRFPEEEEGGCELRVKFSRSAD |
| | | APAYKQGQNQLYNELNLGRREEYDVLDKRRGRDPEMGGKPRRKNPQEG |
| | | LYNELQKDKMAEAYSEIGMKGERRRGKGHDGLYQGLSTATKDTYDALH |
| | | MQALPPR |
| 149362-nt | 1496 | ATGGCCCTCCCTGTCACCGCCCTGCTGCTTCCGCTGGCTCTTCTGCTC |
| Full CAR | | CACGCCGCTCGGCCCCAAGTGCAGCTTCAGGAAAGCGGACCGGGCCTG |
| | | GTCAAGCCATCCGAAACTCTCTCCCTGACTTGCACTGTGTCTGGCGGT |
| | | TCCATCTCATCGTCGTACTACTACTGGGGCTGGATTAGGCAGCCGCCC |
| | | GGAAAGGGACTGGAGTGGATCGGAAGCATCTACTATTCCGGCTCGGCG |
| | | TACTACAACCCTAGCCTCAAGTCGAGAGTGACCATCTCCGTGGATACC |
| | | TCCAAGAACCAGTTTTCCCTGCGCCTGAGCTCCGTGACCGCCGCTGAC |
| | | ACCGCCGTGTACTACTGTGCTCGGCATTGGCAGGAATGGCCCGATGCC |
| | | TTCGACATTTGGGGCCAGGGCACTATGGTCACTGTGTCATCCGGGGGT |
| | | GGAGGCAGCGGGGGAGGAGGGTCCGGGGGGGGAGGTTCAGAGACAACC |
| | | TTGACCCAGTCACCCGCATTCATGTCCGCCACTCCGGGAGACAAGGTC |
| | | ATCATCTCGTGCAAAGCGTCCCAGGATATCGACGATGCCATGAATTGG |
| | | TACCAGCAGAAGCCTGGCGAAGCGCCGCTGTTCATTATCCAATCCGCA |
| | | ACCTCGCCCGTGCCTGGAATCCCACCGCGGTTCAGCGGCAGCGGTTTC |
| | | GGAACCGACTTTTCCCTGACCATTAACAACATTGAGTCCGAGGACGCC |
| | | GCCTACTACTTCTGCCTGCAACACGACAACTTCCCTCTCACGTTCGGC |
| | | CAGGGAACCAAGCTGGAAATCAAGACCACTACCCCAGCACCGAGGCCA |
| | | CCCACCCCGGCTCCTACCATCGCCTCCCAGCCTCTGTCCCTGCGTCCG |
| | | GAGGCATGTAGACCCGCAGCTGGTGGGGCCGTGCATACCCGGGGTCTT |
| | | GACTTCGCCTGCGATATCTACATTTGGGCCCCTCTGGCTGGTACTTGC |
| | | GGGGTCCTGCTGCTTTCACTCGTGATCACTCTTTACTGTAAGCGCGGT |
| | | CGGAAGAAGCTGCTGTACATCTTTAAGCAACCCTTCATGAGGCCTGTG |
| | | CAGACTACTCAAGAGGAGGACGGCTGTTCATGCCGGTTCCCAGAGGAG |
| | | GAGGAAGGCGGCTGCGAACTGCGCGTGAAATTCAGCCGCAGCGCAGAT |
| | | GCTCCAGCCTACAAGCAGGGGCAGAACCAGCTCTACAACGAACTCAAT |
| | | CTTGGTCGGAGAGAGGAGTACGACGTGCTGGACAAGCGGAGAGGACGG |
| | | GACCCAGAAATGGGCGGGAAGCCGCGCAGAAAGAATCCCCAAGAGGGC |
| | | CTGTACAACGAGCTCCAAAAGGATAAGATGGCAGAAGCCTATAGCGAG |
| | | ATTGGTATGAAAGGGGAACGCAGAAGAGGCAAAGGCCACGACGGACTG |
| | | TACCAGGGACTCAGCACCGCCACCAAGGACACCTATGACGCTCTTCAC |
| | | ATGCAGGCCCTGCCGCCTCGG |

149363

| | | |
|---|---|---|
| 149363-aa | 1497 | VNLRESGPALVKPTQTLTLTCTFSGFSLRTSGMCVSWIRQPPGKALEW |
| ScFv | | LARIDWDEDKFYSTSLKTRLTISKDTSDNQVVLRMTNMDPADTATYYC |
| domain | | ARSGAGGTSATAFDIWGPGTMVTVSSGGGGSGGGGSGGGGSDIQMTQS |
| | | PSSLSASVGDRVTITCRASQDIYNNLAWFQLKPGSAPRSLMYAANKSQ |
| | | SGVPSRFSGSASGTDFTLTISSLQPEDFATYYCQHYYRFPYSFGQGTK |
| | | LEIK |
| 149363-nt | 1498 | CAAGTCAATCTGCGCGAATCCGGCCCCGCCTTGGTCAAGCCTACCCAG |
| ScFv | | ACCCTCACTCTGACCTGTACTTTCTCCGGCTTCTCCCTGCGGACTTCC |
| domain | | GGGATGTGCGTGTCCTGGATCAGACAGCCTCCGGGAAAGGCCCTGGAG |
| | | TGGCTCGCTCGCATTGACTGGGATGAGGACAAGTTCTACTCCACCTCA |
| | | CTCAAGACCAGGCTGACCATCAGCAAAGATACCTCTGACAACCAAGTG |
| | | GTGCTCCGCATGACCAACATGGACCCAGCCGACACTGCCACTTACTAC |
| | | TGCGCGAGGAGCGGAGCGGGCGGAACCTCCGCCACCGCCTTCGATATT |
| | | TGGGGCCCGGGTACCATGGTCACCGTGTCAAGCGGAGGAGGGGGGTCC |
| | | GGGGGCGGCGGTTCCGGGGGAGGCGGATCGGACATTCAGATGACTCAG |
| | | TCACCATCGTCCCTGAGCGCTAGCGTGGGCGACAGAGTGACAATCACT |
| | | TGCCGGGCATCCCAGGACATCTATAACAACCTTGCGTGGTTCCAGCTG |
| | | AAGCCTGGTTCCGCACCGCGGTCACTTATGTACGCCGCCAACAAGAGC |
| | | CAGTCGGGAGTGCCGTCCCGGTTTTCCGGTTCGGCCTCGGGAACTGAC |
| | | TTCACCCTGACGATCTCCAGCCTGCAACCCGAGGATTTCGCCACCTAC |
| | | TACTGCCAGCACTACTACCGCTTTCCCTACTCGTTCGGACAGGGAACC |
| | | AAGCTGGAAATCAAG |
| 149363-aa | 1499 | QVNLRESGPALVKPTQTLTLTCTFSGFSLRTSGMCVSWIRQPPGKALE |
| VH | | WLARIDWDEDKFYSTSLKTRLTISKDTSDNQVVLRMTNMDPADTATYY |
| | | CARSGAGGTSATAFDIWGPGTMVTVSS |
| 149363-aa | 1500 | DIQMTQSPSSLSASVGDRVTITCRASQDIYNNLAWFQLKPGSAPRSLM |
| VL | | YAANKSQSGVPSRFSGSASGTDFTLTISSLQPEDFATYYCQHYYRFPY |
| | | SFGQGTKLEIK |
| 149363-aa | 1501 | MALPVTALLLPLALLLHAARPQVNLRESGPALVKPTQTLTLTCTFSGF |
| Full CAR | | SLRTSGMCVSWIRQPPGKALEWLARIDWDEDKFYSTSLKTRLTISKDT |
| | | SDNQVVLRMTNMDPADTATYYCARSGAGGTSATAFDIWGPGTMVTVSS |
| | | GGGGSGGGGSGGGGSDIQMTQSPSSLSASVGDRVTITCRASQDIYNNL |
| | | AWFQLKPGSAPRSLMYAANKSQSGVPSRFSGSASGTDFTLTISSLQPE |
| | | DFATYYCQHYYRFPYSFGQGTKLEIKTTTPAPRPPTPAPTIASQPLSL |
| | | RPEACRPAAGGAVHTRGLDFACDIYIWAPLAGTCGVLLLSLVITLYCK |
| | | RGRKKLLYIFKQPFMRPVQTTQEEDGCSCRFPEEEEGGCELRVKFSRS |
| | | ADAPAYKQGQNQLYNELNLGRREEYDVLDKRRGRDPEMGGKPRRKNPQ |
| | | EGLYNELQKDKMAEAYSEIGMKGERRRGKGHDGLYQGLSTATKDTYDA |
| | | LHMQALPPR |
| 149363-nt | 1502 | ATGGCCCTCCCTGTCACCGCCCTGCTGCTTCCGCTGGCTCTTCTGCTC |
| Full CAR | | CACGCCGCTCGGCCCCAAGTCAATCTGCGCGAATCCGGCCCCGCCTTG |
| | | GTCAAGCCTACCCAGACCCTCACTCTGACCTGTACTTTCTCCGGCTTC |
| | | TCCCTGCGGACTTCCGGGATGTGCGTGTCCTGGATCAGACAGCCTCCG |
| | | GGAAAGGCCCTGGAGTGGCTCGCTCGCATTGACTGGGATGAGGACAAG |
| | | TTCTACTCCACCTCACTCAAGACCAGGCTGACCATCAGCAAAGATACC |
| | | TCTGACAACCAAGTGGTGCTCCGCATGACCAACATGGACCCAGCCGAC |
| | | ACTGCCACTTACTACTGCGCGAGGAGCGGAGCGGGCGGAACCTCCGCC |
| | | ACCGCCTTCGATATTTGGGGCCCGGGTACCATGGTCACCGTGTCAAGC |
| | | GGAGGAGGGGGGTCCGGGGGCGGCGGTTCCGGGGGAGGCGGATCGGAC |
| | | ATTCAGATGACTCAGTCACCATCGTCCCTGAGCGCTAGCGTGGGCGAC |
| | | AGAGTGACAATCACTTGCCGGGCATCCCAGGACATCTATAACAACCTT |
| | | GCGTGGTTCCAGCTGAAGCCTGGTTCCGCACCGCGGTCACTTATGTAC |
| | | GCCGCCAACAAGAGCCAGTCGGGAGTGCCGTCCCGGTTTTCCGGTTCG |
| | | GCCTCGGGAACTGACTTCACCCTGACGATCTCCAGCCTGCAACCCGAG |
| | | GATTTCGCCACCTACTACTGCCAGCACTACTACCGCTTTCCCTACTCG |
| | | TTCGGACAGGGAACCAAGCTGGAAATCAAGACCACTACCCCAGCACCG |
| | | AGGCCACCCACCCCGGCTCCTACCATCGCCTCCCAGCCTCTGTCCCTG |
| | | CGTCCGGAGGCATGTAGACCCGCAGCTGGTGGGGCCGTGCATACCCGG |
| | | GGTCTTGACTTCGCCTGCGATATCTACATTTGGGCCCCTCTGGCTGGT |
| | | ACTTGCGGGGTCCTGCTGCTTTCACTCGTGATCACTCTTTACTGTAAG |
| | | CGCGGTCGGAAGAAGCTGCTGTACATCTTTAAGCAACCCTTCATGAGG |
| | | CCTGTGCAGACTACTCAAGAGGAGGACGGCTGTTCATGCCGGTTCCCA |
| | | GAGGAGGAGGAAGGCGGCTGCGAACTGCGCGTGAAATTCAGCCGCAGC |
| | | GCAGATGCTCCAGCCTACAAGCAGGGGCAGAACCAGCTCTACAACGAA |
| | | CTCAATCTTGGTCGGAGAGAGGAGTACGACGTGCTGGACAAGCGGAGA |
| | | GGACGGGACCCAGAAATGGGCGGGAAGCCGCGCAGAAAGAATCCCCAA |
| | | GAGGGCCTGTACAACGAGCTCCAAAAGGATAAGATGGCAGAAGCCTAT |
| | | AGCGAGATTGGTATGAAAGGGGAACGCAGAAGAGGCAAAGGCCACGAC |
| | | GGACTGTACCAGGGACTCAGCACCGCCACCAAGGACACCTATGACGCT |
| | | CTTCACATGCAGGCCCTGCCGCCTCGG |

149364

| | | |
|---|---|---|
| 149364-aa | 1503 | EVQLVESGGGLVKPGGSLRLSCAASGFTFSSYSMNWVRQAPGKGLEWV |
| ScFv | | SSISSSSSYIYYADSVKGRFTISRDNAKNSLYLQMNSLRAEDTAVYYC |
| domain | | AKTIAAVYAFDIWGQGTTVTVSSGGGGSGGGGSGGGGSEIVLTQSPLS |
| | | LPVTPEEPASISCRSSQSLLHSNGYNYLDWYLQKPGQSPQLLIYLGSN |
| | | RASGVPDRFSGSGSGTDFTLKISRVEAEDVGVYYCMQALQTPYTFGQG |
| | | TKLEIK |
| 149364-nt | 1504 | GAAGTGCAGCTTGTCGAATCCGGGGGGGGACTGGTCAAGCCGGGCGGA |
| ScFv | | TCACTGAGACTGTCCTGCGCCGCGAGCGGCTTCACGTTCTCCTCCTAC |
| domain | | TCCATGAACTGGGTCCGCCAAGCCCCCGGGAAGGGACTGGAATGGGTG |
| | | TCCTCTATCTCCTCGTCGTCGTCCTACATCTACTACGCCGACTCCGTG |
| | | AAGGGAAGATTCACCATTTCCCGCGACAACGCAAAGAACTCACTGTAC |
| | | TTGCAAATGAACTCACTCCGGGCCGAAGATACTGCTGTGTACTATTGC |
| | | GCCAAGACTATTGCCGCCGTCTACGCTTTCGACATCTGGGGCCAGGGA |
| | | ACCACCGTGACTGTGTCGTCCGGTGGTGGTGGCTCGGGCGGAGGAGGA |
| | | AGCGGCGGCGGGGGGTCCGAGATTGTGCTGACCCAGTCGCCACTGAGC |
| | | CTCCCTGTGACCCCCGAGGAACCCGCCAGCATCAGCTGCCGGTCCAGC |
| | | CAGTCCCTGCTCCACTCCAACGGATACAATTACCTCGATTGGTACCTT |
| | | CAGAAGCCTGGACAAAGCCCGCAGCTGCTCATCTACTTGGGATCAAAC |
| | | CGCGCGTCAGGAGTGCCTGACCGGTTCTCCGGCTCGGGCAGCGGTACC |
| | | GATTTCACCCTGAAAATCTCCAGGGTGGAGGCAGAGGACGTGGGAGTG |
| | | TATTACTGTATGCAGGCGCTGCAGACTCCGTACACATTTGGGCAGGGC |
| | | ACCAAGCTGGAGATCAAG |
| 149364-aa | 1505 | EVQLVESGGGLVKPGGSLRLSCAASGFTFSSYSMNWVRQAPGKGLEWV |
| VH | | SSISSSSSYIYYADSVKGRFTISRDNAKNSLYLQMNSLRAEDTAVYYC |
| | | AKTIAAVYAFDIWGQGTTVTVSS |
| 149364-aa | 1506 | EIVLTQSPLSLPVTPEEPASISCRSSQSLLHSNGYNYLDWYLQKPGQS |
| VL | | PQLLIYLGSNRASGVPDRFSGSGSGTDFTLKISRVEAEDVGVYYCMQA |
| | | LQTPYTFGQGTKLEIK |
| 149364-aa | 1507 | MALPVTALLLPLALLLHAARPEVQLVESGGGLVKPGGSLRLSCAASGF |
| Full CAR | | TFSSYSMNWVRQAPGKGLEWVSSISSSSSYIYYADSVKGRFTISRDNA |
| | | KNSLYLQMNSLRAEDTAVYYCAKTIAAVYAFDIWGQGTTVTVSSGGGG |
| | | SGGGGSGGGGSEIVLTQSPLSLPVTPEEPASISCRSSQSLLHSNGYNY |
| | | LDWYLQKPGQSPQLLIYLGSNRASGVPDRFSGSGSGTDFTLKISRVEA |
| | | EDVGVYYCMQALQTPYTFGQGTKLEIKTTTPAPRPPTPAPTIASQPLS |
| | | LRPEACRPAAGGAVHTRGLDFACDIYIWAPLAGTCGVLLLSLVITLYC |
| | | KRGRKKLLYIFKQPFMRPVQTTQEEDGCSCRFPEEEEGGCELRVKFSR |
| | | SADAPAYKQGQNQLYNELNLGRREEYDVLDKRRGRDPEMGGKPRRKNP |
| | | QEGLYNELQKDKMAEAYSEIGMKGERRRGKGHDGLYQGLSTATKDTYD |
| | | ALHMQALPPR |
| 149364-nt | 1508 | ATGGCCCTCCCTGTCACCGCCCTGCTGCTTCCGCTGGCTCTTCTGCTC |
| Full CAR | | CACGCCGCTCGGCCCGAAGTGCAGCTTGTCGAATCCGGGGGGGGACTG |
| | | GTCAAGCCGGGCGGATCACTGAGACTGTCCTGCGCCGCGAGCGGCTTC |
| | | ACGTTCTCCTCCTACTCCATGAACTGGGTCCGCCAAGCCCCCGGGAAG |
| | | GGACTGGAATGGGTGTCCTCTATCTCCTCGTCGTCGTCCTACATCTAC |
| | | TACGCCGACTCCGTGAAGGGAAGATTCACCATTTCCCGCGACAACGCA |
| | | AAGAACTCACTGTACTTGCAAATGAACTCACTCCGGGCCGAAGATACT |
| | | GCTGTGTACTATTGCGCCAAGACTATTGCCGCCGTCTACGCTTTCGAC |
| | | ATCTGGGGCCAGGGAACCACCGTGACTGTGTCGTCCGGTGGTGGTGGC |
| | | TCGGGCGGAGGAGGAAGCGGCGGCGGGGGGTCCGAGATTGTGCTGACC |
| | | CAGTCGCCACTGAGCCTCCCTGTGACCCCCGAGGAACCCGCCAGCATC |
| | | AGCTGCCGGTCCAGCCAGTCCCTGCTCCACTCCAACGGATACAATTAC |
| | | CTCGATTGGTACCTTCAGAAGCCTGGACAAAGCCCGCAGCTGCTCATC |
| | | TACTTGGGATCAAACCGCGCGTCAGGAGTGCCTGACCGGTTCTCCGGC |
| | | TCGGGCAGCGGTACCGATTTCACCCTGAAAATCTCCAGGGTGGAGGCA |
| | | GAGGACGTGGGAGTGTATTACTGTATGCAGGCGCTGCAGACTCCGTAC |
| | | ACATTTGGGCAGGGCACCAAGCTGGAGATCAAGACCACTACCCCAGCA |
| | | CCGAGGCCACCCACCCCGGCTCCTACCATCGCCTCCCAGCCTCTGTCC |
| | | CTGCGTCCGGAGGCATGTAGACCCGCAGCTGGTGGGGCCGTGCATACC |
| | | CGGGGTCTTGACTTCGCCTGCGATATCTACATTTGGGCCCCTCTGGCT |
| | | GGTACTTGCGGGGTCCTGCTGCTTTCACTCGTGATCACTCTTTACTGT |
| | | AAGCGCGGTCGGAAGAAGCTGCTGTACATCTTTAAGCAACCCTTCATG |
| | | AGGCCTGTGCAGACTACTCAAGAGGAGGACGGCTGTTCATGCCGGTTC |
| | | CCAGAGGAGGAGGAAGGCGGCTGCGAACTGCGCGTGAAATTCAGCCGC |
| | | AGCGCAGATGCTCCAGCCTACAAGCAGGGGCAGAACCAGCTCTACAAC |
| | | GAACTCAATCTTGGTCGGAGAGAGGAGTACGACGTGCTGGACAAGCGG |
| | | AGAGGACGGGACCCAGAAATGGGCGGGAAGCCGCGCAGAAAGAATCCC |
| | | CAAGAGGGCCTGTACAACGAGCTCCAAAAGGATAAGATGGCAGAAGCC |
| | | TATAGCGAGATTGGTATGAAAGGGGAACGCAGAAGAGGCAAAGGCCAC |
| | | GACGGACTGTACCAGGGACTCAGCACCGCCACCAAGGACACCTATGAC |
| | | GCTCTTCACATGCAGGCCCTGCCGCCTCGG |

149365

| | | |
|---|---|---|
| 149365-aa | 1509 | EVQLVESGGGLVKPGGSLRLSCAASGFTFSDYYMSWIRQAPGKGLEWV |
| ScFv | | SYISSSGSTIYYADSVKGRFTISRDNAKNSLYLQMNSLRAEDTAVYYC |
| domain | | ARDLRGAFDIWGQGTMVTVSSGGGGSGGGGSGGGGSSYVLTQSPSVSA |
| | | APGYTATISCGGNNIGTKSVHWYQQKPGQAPLLVIRDDSVRPSKIPGR |
| | | FSGSNSGNMATLTISGVQAGDEADFYCQVWDSDSEHVVFGGGTKLTVL |
| 149365-nt | 1510 | GAAGTCCAGCTCGTGGAGTCCGGCGGAGGCCTTGTGAAGCCTGGAGGT |
| ScFv | | TCGCTGAGACTGTCCTGCGCCGCCTCCGGCTTCACCTTCTCCGACTAC |
| domain | | TACATGTCCTGGATCAGACAGGCCCCGGGAAAGGGCCTGGAATGGGTG |
| | | TCCTACATCTCGTCATCGGGCAGCACTATCTACTACGCGGACTCAGTG |
| | | AAGGGGCGGTTCACCATTTCCCGGGATAACGCGAAGAACTCGCTGTAT |
| | | CTGCAAATGAACTCACTGAGGGCCGAGGACACCGCCGTGTACTACTGC |
| | | GCCCGCGATCTCCGCGGGGCATTTGACATCTGGGGACAGGGAACCATG |
| | | GTCACAGTGTCCAGCGGAGGGGGAGGATCGGGTGGCGGAGGTTCCGGG |
| | | GGTGGAGGCTCCTCCTACGTGCTGACTCAGAGCCCAAGCGTCAGCGCT |
| | | GCGCCCGGTTACACGGCAACCATCTCCTGTGGCGGAAACAACATTGGG |
| | | ACCAAGTCTGTGCACTGGTATCAGCAGAAGCCGGGCCAAGCTCCCCTG |
| | | TTGGTGATCCGCGATGACTCCGTGCGGCCTAGCAAAATTCCGGGACGG |
| | | TTCTCCGGCTCCAACAGCGGCAATATGGCCACTCTCACCATCTCGGGA |
| | | GTGCAGGCCGGAGATGAAGCCGACTTCTACTGCCAAGTCTGGGACTCA |
| | | GACTCCGAGCATGTGGTGTTCGGGGGCGGAACCAAGCTGACTGTGCTC |
| 149365-aa | 1511 | EVQLVESGGGLVKPGGSLRLSCAASGFTFSDYYMSWIRQAPGKGLEWV |
| VH | | SYISSSGSTIYYADSVKGRFTISRDNAKNSLYLQMNSLRAEDTAVYYC |
| | | ARDLRGAFDIWGQGTMVTVSS |
| 149365-aa | 1512 | SYVLTQSPSVSAAPGYTATISCGGNNIGTKSVHWYQQKPGQAPLLVIR |
| VL | | DDSVRPSKIPGRFSGSNSGNMATLTISGVQAGDEADFYCQVWDSDSEH |
| | | VVFGGGTKLTVL |
| 149365-aa | 1513 | MALPVTALLLPLALLLHAARPEVQLVESGGGLVKPGGSLRLSCAASGF |
| Full CAR | | TFSDYYMSWIRQAPGKGLEWVSYISSSGSTIYYADSVKGRFTISRDNA |
| | | KNSLYLQMNSLRAEDTAVYYCARDLRGAFDIWGQGTMVTVSSGGGGSG |
| | | GGGSGGGGSSYVLTQSPSVSAAPGYTATISCGGNNIGTKSVHWYQQKP |
| | | GQAPLLVIRDDSVRPSKIPGRFSGSNSGNMATLTISGVQAGDEADFYC |
| | | QVWDSDSEHVVFGGGTKLTVLTTTPAPRPPTPAPTIASQPLSLRPEAC |
| | | RPAAGGAVHTRGLDFACDIYIWAPLAGTCGVLLLSLVITLYCKRGRKK |
| | | LLYIFKQPFMRPVQTTQEEDGCSCRFPEEEEGGCELRVKFSRSADAPA |
| | | YKQGQNQLYNELNLGRREEYDVLDKRRGRDPEMGGKPRRKNPQEGLYN |
| | | ELQKDKMAEAYSEIGMKGERRRGKGHDGLYQGLSTATKDTYDALHMQA |
| | | LPPR |
| 149365-nt | 1514 | ATGGCCCTCCCTGTCACCGCCCTGCTGCTTCCGCTGGCTCTTCTGCTC |
| Full CAR | | CACGCCGCTCGGCCCGAAGTCCAGCTCGTGGAGTCCGGCGGAGGCCTT |
| | | GTGAAGCCTGGAGGTTCGCTGAGACTGTCCTGCGCCGCCTCCGGCTTC |
| | | ACCTTCTCCGACTACTACATGTCCTGGATCAGACAGGCCCCGGGAAAG |
| | | GGCCTGGAATGGGTGTCCTACATCTCGTCATCGGGCAGCACTATCTAC |
| | | TACGCGGACTCAGTGAAGGGGCGGTTCACCATTTCCCGGGATAACGCG |
| | | AAGAACTCGCTGTATCTGCAAATGAACTCACTGAGGGCCGAGGACACC |
| | | GCCGTGTACTACTGCGCCCGCGATCTCCGCGGGGCATTTGACATCTGG |
| | | GGACAGGGAACCATGGTCACAGTGTCCAGCGGAGGGGGAGGATCGGGT |
| | | GGCGGAGGTTCCGGGGGTGGAGGCTCCTCCTACGTGCTGACTCAGAGC |
| | | CCAAGCGTCAGCGCTGCGCCCGGTTACACGGCAACCATCTCCTGTGGC |
| | | GGAAACAACATTGGGACCAAGTCTGTGCACTGGTATCAGCAGAAGCCG |
| | | GGCCAAGCTCCCCTGTTGGTGATCCGCGATGACTCCGTGCGGCCTAGC |
| | | AAAATTCCGGGACGGTTCTCCGGCTCCAACAGCGGCAATATGGCCACT |
| | | CTCACCATCTCGGGAGTGCAGGCCGGAGATGAAGCCGACTTCTACTGC |
| | | CAAGTCTGGGACTCAGACTCCGAGCATGTGGTGTTCGGGGGCGGAACC |
| | | AAGCTGACTGTGCTCACCACTACCCCAGCACCGAGGCCACCCACCCCG |
| | | GCTCCTACCATCGCCTCCCAGCCTCTGTCCCTGCGTCCGGAGGCATGT |
| | | AGACCCGCAGCTGGTGGGGCCGTGCATACCCGGGGTCTTGACTTCGCC |
| | | TGCGATATCTACATTTGGGCCCCTCTGGCTGGTACTTGCGGGGTCCTG |
| | | CTGCTTTCACTCGTGATCACTCTTTACTGTAAGCGCGGTCGGAAGAAG |
| | | CTGCTGTACATCTTTAAGCAACCCTTCATGAGGCCTGTGCAGACTACT |
| | | CAAGAGGAGGACGGCTGTTCATGCCGGTTCCCAGAGGAGGAGGAAGGC |
| | | GGCTGCGAACTGCGCGTGAAATTCAGCCGCAGCGCAGATGCTCCAGCC |
| | | TACAAGCAGGGGCAGAACCAGCTCTACAACGAACTCAATCTTGGTCGG |
| | | AGAGAGGAGTACGACGTGCTGGACAAGCGGAGAGGACGGGACCCAGAA |
| | | ATGGGCGGGAAGCCGCGCAGAAAGAATCCCCAAGAGGGCCTGTACAAC |
| | | GAGCTCCAAAAGGATAAGATGGCAGAAGCCTATAGCGAGATTGGTATG |
| | | AAAGGGGAACGCAGAAGAGGCAAAGGCCACGACGGACTGTACCAGGGA |
| | | CTCAGCACCGCCACCAAGGACACCTATGACGCTCTTCACATGCAGGCC |
| | | CTGCCGCCTCGG |

149366

| | | |
|---|---|---|
| 149366-aa | 1515 | QVQLVQSGAEVKKPGASVKVSCKPSGYTVTSHYIHWVRRAPGQGLEWM |
| ScFv | | GMINPSGGVTAYSQTLQGRVTMTSDTSSSTVYMELSSLRSEDTAMYYC |
| domain | | AREGSGSGWYFDFWGRGTLVTVSSGGGGSGGGGSGGGGSSYVLTQPPS |
| | | VSVSPGQTASITCSGDGLSKKYVSWYQQKAGQSPVVLISRDKERPSGI |
| | | PDRFSGSNSADTATLTISGTQAMDEADYYCQAWDDTTVVFGGGTKLTV |
| | | L |
| 149366-nt | 1516 | CAAGTGCAGCTGGTGCAGAGCGGGGCCGAAGTCAAGAAGCCGGGAGCC |
| ScFv | | TCCGTGAAAGTGTCCTGCAAGCCTTCGGGATACACCGTGACCTCCCAC |
| domain | | TACATTCATTGGGTCCGCCGCGCCCCCGGCCAAGGACTCGAGTGGATG |
| | | GGCATGATCAACCCTAGCGGCGGAGTGACCGCGTACAGCCAGACGCTG |
| | | CAGGGACGCGTGACTATGACCTCGGATACCTCCTCCTCCACCGTCTAT |
| | | ATGGAACTGTCCAGCCTGCGGTCCGAGGATACCGCCATGTACTACTGC |
| | | GCCCGGGAAGGATCAGGCTCCGGGTGGTATTTCGACTTCTGGGGAAGA |
| | | GGCACCCTCGTGACTGTGTCATCTGGGGGAGGGGGTTCCGGTGGTGGC |
| | | GGATCGGGAGGAGGCGGTTCATCCTACGTGCTGACCCAGCCACCCTCC |
| | | GTGTCCGTGAGCCCCGGCCAGACTGCATCGATTACATGTAGCGGCGAC |
| | | GGCCTCTCCAAGAAATACGTGTCGTGGTACCAGCAGAAGGCCGGACAG |
| | | AGCCCGGTGGTGCTGATCTCAAGAGATAAGGAGCGGCCTAGCGGAATC |
| | | CCGGACAGGTTCTCGGGTTCCAACTCCGCGGACACTGCTACTCTGACC |
| | | ATCTCGGGGACCCAGGCTATGGACGAAGCCGATTACTACTGCCAAGCC |
| | | TGGGACGACACTACTGTCGTGTTTGGAGGGGGCACCAAGTTGACCGTC |
| | | CTT |
| 149366-aa | 1517 | QVQLVQSGAEVKKPGASVKVSCKPSGYTVTSHYIHWVRRAPGQGLEWM |
| VH | | GMINPSGGVTAYSQTLQGRVTMTSDTSSSTVYMELSSLRSEDTAMYYC |
| | | AREGSGSGWYFDFWGRGTLVTVSS |
| 149366-aa | 1518 | SYVLTQPPSVSVSPGQTASITCSGDGLSKKYVSWYQQKAGQSPVVLIS |
| VL | | RDKERPSGIPDRFSGSNSADTATLTISGTQAMDEADYYCQAWDDTTVV |
| | | FGGGTKLTVL |
| 149366-aa | 1519 | MALPVTALLLPLALLLHAARPQVQLVQSGAEVKKPGASVKVSCKPSGY |
| Full CAR | | TVTSHYIHWVRRAPGQGLEWMGMINPSGGVTAYSQTLQGRVTMTSDTS |
| | | SSTVYMELSSLRSEDTAMYYCAREGSGSGWYFDFWGRGTLVTVSSGGG |
| | | GSGGGGSGGGGSSYVLTQPPSVSVSPGQTASITCSGDGLSKKYVSWYQ |
| | | QKAGQSPVVLISRDKERPSGIPDRFSGSNSADTATLTISGTQAMDEAD |
| | | YYCQAWDDTTVVFGGGTKLTVLTTTPAPRPPTPAPTIASQPLSLRPEA |
| | | CRPAAGGAVHTRGLDFACDIYIWAPLAGTCGVLLLSLVITLYCKRGRK |
| | | KLLYIFKQPFMRPVQTTQEEDGCSCRFPEEEEGGCELRVKFSRSADAP |
| | | AYKQGQNQLYNELNLGRREEYDVLDKRRGRDPEMGGKPRRKNPQEGLY |
| | | NELQKDKMAEAYSEIGMKGERRRGKGHDGLYQGLSTATKDTYDALHMQ |
| | | ALPPR |
| 149366-nt | 1520 | ATGGCCCTCCCTGTCACCGCCCTGCTGCTTCCGCTGGCTCTTCTGCTC |
| Full CAR | | CACGCCGCTCGGCCCCAAGTGCAGCTGGTGCAGAGCGGGGCCGAAGTC |
| | | AAGAAGCCGGGAGCCTCCGTGAAAGTGTCCTGCAAGCCTTCGGGATAC |
| | | ACCGTGACCTCCCACTACATTCATTGGGTCCGCCGCGCCCCCGGCCAA |
| | | GGACTCGAGTGGATGGGCATGATCAACCCTAGCGGCGGAGTGACCGCG |
| | | TACAGCCAGACGCTGCAGGGACGCGTGACTATGACCTCGGATACCTCC |
| | | TCCTCCACCGTCTATATGGAACTGTCCAGCCTGCGGTCCGAGGATACC |
| | | GCCATGTACTACTGCGCCCGGGAAGGATCAGGCTCCGGGTGGTATTTC |
| | | GACTTCTGGGGAAGAGGCACCCTCGTGACTGTGTCATCTGGGGGAGGG |
| | | GGTTCCGGTGGTGGCGGATCGGGAGGAGGCGGTTCATCCTACGTGCTG |
| | | ACCCAGCCACCCTCCGTGTCCGTGAGCCCCGGCCAGACTGCATCGATT |
| | | ACATGTAGCGGCGACGGCCTCTCCAAGAAATACGTGTCGTGGTACCAG |
| | | CAGAAGGCCGGACAGAGCCCGGTGGTGCTGATCTCAAGAGATAAGGAG |
| | | CGGCCTAGCGGAATCCCGGACAGGTTCTCGGGTTCCAACTCCGCGGAC |
| | | ACTGCTACTCTGACCATCTCGGGGACCCAGGCTATGGACGAAGCCGAT |
| | | TACTACTGCCAAGCCTGGGACGACACTACTGTCGTGTTTGGAGGGGGC |
| | | ACCAAGTTGACCGTCCTTACCACTACCCCAGCACCGAGGCCACCCACC |
| | | CCGGCTCCTACCATCGCCTCCCAGCCTCTGTCCCTGCGTCCGGAGGCA |
| | | TGTAGACCCGCAGCTGGTGGGGCCGTGCATACCCGGGGTCTTGACTTC |
| | | GCCTGCGATATCTACATTTGGGCCCCTCTGGCTGGTACTTGCGGGGTC |
| | | CTGCTGCTTTCACTCGTGATCACTCTTTACTGTAAGCGCGGTCGGAAG |
| | | AAGCTGCTGTACATCTTTAAGCAACCCTTCATGAGGCCTGTGCAGACT |
| | | ACTCAAGAGGAGGACGGCTGTTCATGCCGGTTCCCAGAGGAGGAGGAA |
| | | GGCGGCTGCGAACTGCGCGTGAAATTCAGCCGCAGCGCAGATGCTCCA |
| | | GCCTACAAGCAGGGGCAGAACCAGCTCTACAACGAACTCAATCTTGGT |
| | | CGGAGAGAGGAGTACGACGTGCTGGACAAGCGGAGAGGACGGGACCCA |
| | | GAAATGGGCGGGAAGCCGCGCAGAAAGAATCCCCAAGAGGGCCTGTAC |
| | | AACGAGCTCCAAAAGGATAAGATGGCAGAAGCCTATAGCGAGATTGGT |
| | | ATGAAAGGGGAACGCAGAAGAGGCAAAGGCCACGACGGACTGTACCAG |
| | | GGACTCAGCACCGCCACCAAGGACACCTATGACGCTCTTCACATGCAG |
| | | GCCCTGCCGCCTCGG |

149367

| | | |
|---|---|---|
| 149367-aa | 1521 | QVQLQESGPGLVKPSQTLSLTCTVSGGSISSGGYYWSWIRQHPGKGLE |
| ScFv | | WIGYIYYSGSTYYNPSLKSRVTISVDTSKNQFSLKLSSVTAADTAVYY |
| domain | | CARAGIAARLRGAFDIWGQGTMVTVSSGGGGSGGGGSGGGGSDIVMTQ |
| | | SPSSVSASVGDRVIITCRASQGIRNWLAWYQQKPGKAPNLLIYAASNL |
| | | QSGVPSRFSGSGSGADFTLTISSLQPEDVATYYCQKYNSAPFTFGPGT |
| | | KVDIK |
| 149367-nt | 1522 | CAAGTGCAGCTTCAGGAGAGCGGCCCGGGACTCGTGAAGCCGTCCCAG |
| ScFv | | ACCCTGTCCCTGACTTGCACCGTGTCGGGAGGAAGCATCTCGAGCGGA |
| domain | | GGCTACTATTGGTCGTGGATTCGGCAGCACCCTGGAAAGGGCCTGGAA |
| | | TGGATCGGCTACATCTACTACTCCGGCTCGACCTACTACAACCCATCG |
| | | CTGAAGTCCAGAGTGACAATCTCAGTGGACACGTCCAAGAATCAGTTC |
| | | AGCCTGAAGCTCTCTTCCGTGACTGCGGCCGACACCGCCGTGTACTAC |
| | | TGCGCACGCGCTGGAATTGCCGCCCGGCTGAGGGGTGCCTTCGACATT |
| | | TGGGGACAGGGCACCATGGTCACCGTGTCCTCCGGCGGCGGAGGTTCC |
| | | GGGGGTGGAGGCTCAGGAGGAGGGGGGTCCGACATCGTCATGACTCAG |
| | | TCGCCCTCAAGCGTCAGCGCGTCCGTCGGGGACAGAGTGATCATCACC |
| | | TGTCGGGCGTCCCAGGGAATTCGCAACTGGCTGGCCTGGTATCAGCAG |
| | | AAGCCCGGAAAGGCCCCCAACCTGTTGATCTACGCCGCCTCAAACCTC |
| | | CAATCCGGGGTGCCGAGCCGCTTCAGCGGCTCCGGTTCGGGTGCCGAT |
| | | TTCACTCTGACCATCTCCTCCCTGCAACCTGAAGATGTGGCTACCTAC |
| | | TACTGCCAAAAGTACAACTCCGCACCTTTTACTTTCGGACCGGGGACC |
| | | AAAGTGGACATTAAG |
| 149367-aa | 1523 | QVQLQESGPGLVKPSQTLSLTCTVSGGSISSGGYYWSWIRQHPGKGLE |
| VH | | WIGYIYYSGSTYYNPSLKSRVTISVDTSKNQFSLKLSSVTAADTAVYY |
| | | CARAGIAARLRGAFDIWGQGTMVTVSS |
| 149367-aa | 1524 | DIVMTQSPSSVSASVGDRVIITCRASQGIRNWLAWYQQKPGKAPNLLI |
| VL | | YAASNLQSGVPSRFSGSGSGADFTLTISSLQPEDVATYYCQKYNSAPF |
| | | TFGPGTKVDIK |
| 149367-aa | 1525 | MALPVTALLLPLALLLHAARPQVQLQESGPGLVKPSQTLSLTCTVSGG |
| Full CAR | | SISSGGYYWSWIRQHPGKGLEWIGYIYYSGSTYYNPSLKSRVTISVDT |
| | | SKNQFSLKLSSVTAADTAVYYCARAGIAARLRGAFDIWGQGTMVTVSS |
| | | GGGGSGGGGSGGGGSDIVMTQSPSSVSASVGDRVIITCRASQGIRNWL |
| | | AWYQQKPGKAPNLLIYAASNLQSGVPSRFSGSGSGADFTLTISSLQPE |
| | | DVATYYCQKYNSAPFTFGPGTKVDIKTTTPAPRPPTPAPTIASQPLSL |
| | | RPEACRPAAGGAVHTRGLDFACDIYIWAPLAGTCGVLLLSLVITLYCK |
| | | RGRKKLLYIFKQPFMRPVQTTQEEDGCSCRFPEEEEGGCELRVKFSRS |
| | | ADAPAYKQGQNQLYNELNLGRREEYDVLDKRRGRDPEMGGKPRRKNPQ |
| | | EGLYNELQKDKMAEAYSEIGMKGERRRGKGHDGLYQGLSTATKDTYDA |
| | | LHMQALPPR |
| 149367-nt | 1526 | ATGGCCCTCCCTGTCACCGCCCTGCTGCTTCCGCTGGCTCTTCTGCTC |
| Full CAR | | CACGCCGCTCGGCCCCAAGTGCAGCTTCAGGAGAGCGGCCCGGGACTC |
| | | GTGAAGCCGTCCCAGACCCTGTCCCTGACTTGCACCGTGTCGGGAGGA |
| | | AGCATCTCGAGCGGAGGCTACTATTGGTCGTGGATTCGGCAGCACCCT |
| | | GGAAAGGGCCTGGAATGGATCGGCTACATCTACTACTCCGGCTCGACC |
| | | TACTACAACCCATCGCTGAAGTCCAGAGTGACAATCTCAGTGGACACG |
| | | TCCAAGAATCAGTTCAGCCTGAAGCTCTCTTCCGTGACTGCGGCCGAC |
| | | ACCGCCGTGTACTACTGCGCACGCGCTGGAATTGCCGCCCGGCTGAGG |
| | | GGTGCCTTCGACATTTGGGGACAGGGCACCATGGTCACCGTGTCCTCC |
| | | GGCGGCGGAGGTTCCGGGGGTGGAGGCTCAGGAGGAGGGGGGTCCGAC |
| | | ATCGTCATGACTCAGTCGCCCTCAAGCGTCAGCGCGTCCGTCGGGGAC |
| | | AGAGTGATCATCACCTGTCGGGCGTCCCAGGGAATTCGCAACTGGCTG |
| | | GCCTGGTATCAGCAGAAGCCCGGAAAGGCCCCCAACCTGTTGATCTAC |
| | | GCCGCCTCAAACCTCCAATCCGGGGTGCCGAGCCGCTTCAGCGGCTCC |
| | | GGTTCGGGTGCCGATTTCACTCTGACCATCTCCTCCCTGCAACCTGAA |
| | | GATGTGGCTACCTACTACTGCCAAAAGTACAACTCCGCACCTTTTACT |
| | | TTCGGACCGGGGACCAAAGTGGACATTAAGACCACTACCCCAGCACCG |
| | | AGGCCACCCACCCCGGCTCCTACCATCGCCTCCCAGCCTCTGTCCCTG |
| | | CGTCCGGAGGCATGTAGACCCGCAGCTGGTGGGGCCGTGCATACCCGG |
| | | GGTCTTGACTTCGCCTGCGATATCTACATTTGGGCCCCTCTGGCTGGT |
| | | ACTTGCGGGGTCCTGCTGCTTTCACTCGTGATCACTCTTTACTGTAAG |
| | | CGCGGTCGGAAGAAGCTGCTGTACATCTTTAAGCAACCCTTCATGAGG |
| | | CCTGTGCAGACTACTCAAGAGGAGGACGGCTGTTCATGCCGGTTCCCA |
| | | GAGGAGGAGGAAGGCGGCTGCGAACTGCGCGTGAAATTCAGCCGCAGC |
| | | GCAGATGCTCCAGCCTACAAGCAGGGGCAGAACCAGCTCTACAACGAA |
| | | CTCAATCTTGGTCGGAGAGAGGAGTACGACGTGCTGGACAAGCGGAGA |
| | | GGACGGGACCCAGAAATGGGCGGGAAGCCGCGCAGAAAGAATCCCCAA |
| | | GAGGGCCTGTACAACGAGCTCCAAAAGGATAAGATGGCAGAAGCCTAT |
| | | AGCGAGATTGGTATGAAAGGGGAACGCAGAAGAGGCAAAGGCCACGAC |
| | | GGACTGTACCAGGGACTCAGCACCGCCACCAAGGACACCTATGACGCT |
| | | CTTCACATGCAGGCCCTGCCGCCTCGG |

149368

| | | |
|---|---|---|
| 149368-aa | 1527 | QVQLVQSGAEVKKPGSSVKVSCKASGGTFSSYAISWVRQAPGQGLEWM |
| ScFv | | GGIIPIFGTANYAQKFQGRVTITADESTSTAYMELSSLRSEDTAVYYC |
| domain | | ARRGGYQLLRWDVGLLRSAFDIWGQGTMVTVSSGGGGSGGGGSGGGGS |
| | | SYVLTQPPSVSVAPGQTARITCGGNNIGSKSVHWYQQKPGQAPVLVLY |
| | | GKNNRPSGVPDRFSGSRSGTTASLTITGAQAEDEADYYCSSRDSSGDH |
| | | LRVFGTGTKVTVL |
| 149368-nt | 1528 | CAAGTGCAGCTGGTCCAGTCGGGCGCCGAGGTCAAGAAGCCCGGGAGC |
| ScFv | | TCTGTGAAAGTGTCCTGCAAGGCCTCCGGGGGCACCTTTAGCTCCTAC |
| domain | | GCCATCTCCTGGGTCCGCCAAGCACCGGGTCAAGGCCTGGAGTGGATG |
| | | GGGGGAATTATCCCTATCTTCGGCACTGCCAACTACGCCCAGAAGTTC |
| | | CAGGGACGCGTGACCATTACCGCGGACGAATCCACCTCCACCGCTTAT |
| | | ATGGAGCTGTCCAGCTTGCGCTCGGAAGATACCGCCGTGTACTACTGC |
| | | GCCCGGAGGGGTGGATACCAGCTGCTGAGATGGGACGTGGGCCTCCTG |
| | | CGGTCGGCGTTCGACATCTGGGGCCAGGGCACTATGGTCACTGTGTCC |
| | | AGCGGAGGAGGCGGATCGGGAGGCGGCGGATCAGGGGGAGGCGGTTCC |
| | | AGCTACGTGCTTACTCAACCCCCTTCGGTGTCCGTGGCCCCGGGACAG |
| | | ACCGCCAGAATCACTTGCGGAGGAAACAACATTGGGTCCAAGAGCGTG |
| | | CATTGGTACCAGCAGAAGCCAGGACAGGCCCCTGTGCTGGTGCTCTAC |
| | | GGGAAGAACAATCGGCCCAGCGGAGTGCCGGACAGGTTCTCGGGTTCA |
| | | CGCTCCGGTACAACCGCTTCACTGACTATCACCGGGGCCCAGGCAGAG |
| | | GATGAAGCGGACTACTACTGTTCCTCCCGGGATTCATCCGGCGACCAC |
| | | CTCCGGGTGTTCGGAACCGGAACGAAGGTCACCGTGCTG |
| 149368-aa | 1529 | QVQLVQSGAEVKKPGSSVKVSCKASGGTFSSYAISWVRQAPGQGLEWM |
| VH | | GGIIPIFGTANYAQKFQGRVTITADESTSTAYMELSSLRSEDTAVYYC |
| | | ARRGGYQLLRWDVGLLRSAFDIWGQGTMVTVSS |
| 149368-aa | 1530 | SYVLTQPPSVSVAPGQTARITCGGNNIGSKSVHWYQQKPGQAPVLVLY |
| VL | | GKNNRPSGVPDRFSGSRSGTTASLTITGAQAEDEADYYCSSRDSSGDH |
| | | LRVFGTGTKVTVL |
| 149368-aa | 1531 | MALPVTALLLPLALLLHAARPQVQLVQSGAEVKKPGSSVKVSCKASGG |
| Full CAR | | TESSYAISWVRQAPGQGLEWMGGIIPIFGTANYAQKFQGRVTITADES |
| | | TSTAYMELSSLRSEDTAVYYCARRGGYQLLRWDVGLLRSAFDIWGQGT |
| | | MVTVSSGGGGSGGGGSGGGGSSYVLTQPPSVSVAPGQTARITCGGNNI |
| | | GSKSVHWYQQKPGQAPVLVLYGKNNRPSGVPDRFSGSRSGTTASLTIT |
| | | GAQAEDEADYYCSSRDSSGDHLRVFGTGTKVTVLTTTPAPRPPTPAPT |
| | | IASQPLSLRPEACRPAAGGAVHTRGLDFACDIYIWAPLAGTCGVLLLS |
| | | LVITLYCKRGRKKLLYIFKQPFMRPVQTTQEEDGCSCRFPEEEEGGCE |
| | | LRVKFSRSADAPAYKQGQNQLYNELNLGRREEYDVLDKRRGRDPEMGG |
| | | KPRRKNPQEGLYNELQKDKMAEAYSEIGMKGERRRGKGHDGLYQGLST |
| | | ATKDTYDALHMQALPPR |
| 149368-nt | 1532 | ATGGCCCTCCCTGTCACCGCCCTGCTGCTTCCGCTGGCTCTTCTGCTC |
| Full CAR | | CACGCCGCTCGGCCCCAAGTGCAGCTGGTCCAGTCGGGCGCCGAGGTC |
| | | AAGAAGCCCGGGAGCTCTGTGAAAGTGTCCTGCAAGGCCTCCGGGGGC |
| | | ACCTTTAGCTCCTACGCCATCTCCTGGGTCCGCCAAGCACCGGGTCAA |
| | | GGCCTGGAGTGGATGGGGGGAATTATCCCTATCTTCGGCACTGCCAAC |
| | | TACGCCCAGAAGTTCCAGGGACGCGTGACCATTACCGCGGACGAATCC |
| | | ACCTCCACCGCTTATATGGAGCTGTCCAGCTTGCGCTCGGAAGATACC |
| | | GCCGTGTACTACTGCGCCCGGAGGGGTGGATACCAGCTGCTGAGATGG |
| | | GACGTGGGCCTCCTGCGGTCGGCGTTCGACATCTGGGGCCAGGGCACT |
| | | ATGGTCACTGTGTCCAGCGGAGGAGGCGGATCGGGAGGCGGCGGATCA |
| | | GGGGGAGGCGGTTCCAGCTACGTGCTTACTCAACCCCCTTCGGTGTCC |
| | | GTGGCCCCGGGACAGACCGCCAGAATCACTTGCGGAGGAAACAACATT |
| | | GGGTCCAAGAGCGTGCATTGGTACCAGCAGAAGCCAGGACAGGCCCCT |
| | | GTGCTGGTGCTCTACGGGAAGAACAATCGGCCCAGCGGAGTGCCGGAC |
| | | AGGTTCTCGGGTTCACGCTCCGGTACAACCGCTTCACTGACTATCACC |
| | | GGGGCCCAGGCAGAGGATGAAGCGGACTACTACTGTTCCTCCCGGGAT |
| | | TCATCCGGCGACCACCTCCGGGTGTTCGGAACCGGAACGAAGGTCACC |
| | | GTGCTGACCACTACCCCAGCACCGAGGCCACCCACCCCGGCTCCTACC |
| | | ATCGCCTCCCAGCCTCTGTCCCTGCGTCCGGAGGCATGTAGACCCGCA |
| | | GCTGGTGGGGCCGTGCATACCCGGGGTCTTGACTTCGCCTGCGATATC |
| | | TACATTTGGGCCCCTCTGGCTGGTACTTGCGGGGTCCTGCTGCTTTCA |
| | | CTCGTGATCACTCTTTACTGTAAGCGCGGTCGGAAGAAGCTGCTGTAC |
| | | ATCTTTAAGCAACCCTTCATGAGGCCTGTGCAGACTACTCAAGAGGAG |
| | | GACGGCTGTTCATGCCGGTTCCCAGAGGAGGAGGAAGGCGGCTGCGAA |
| | | CTGCGCGTGAAATTCAGCCGCAGCGCAGATGCTCCAGCCTACAAGCAG |
| | | GGGCAGAACCAGCTCTACAACGAACTCAATCTTGGTCGGAGAGAGGAG |
| | | TACGACGTGCTGGACAAGCGGAGAGGACGGGACCCAGAAATGGGCGGG |
| | | AAGCCGCGCAGAAAGAATCCCCAAGAGGGCCTGTACAACGAGCTCCAA |
| | | AAGGATAAGATGGCAGAAGCCTATAGCGAGATTGGTATGAAAGGGGAA |
| | | CGCAGAAGAGGCAAAGGCCACGACGGACTGTACCAGGGACTCAGCACC |
| | | GCCACCAAGGACACCTATGACGCTCTTCACATGCAGGCCCTGCCGCCT |
| | | CGG |

149369

| | | |
|---|---|---|
| 149369-aa | 1533 | EVQLQQSGPGLVKPSQTLSLTCAISGDSVSSNSAAWNWIRQSPSRGLE |
| ScFv | | WLGRTYYRSKWYSFYAISLKSRIIINPDTSKNQFSLQLKSVTPEDTAV |
| domain | | YYCARSSPEGLFLYWFDPWGQGTLVTVSSGGDGSGGGGSGGGGSSSEL |
| | | TQDPAVSVALGQTIRITCQGDSLGNYYATWYQQKPGQAPVLVIYGTNN |
| | | RPSGIPDRFSASSSGNTASLTITGAQAEDEADYYCNSRDSSGHHLLFG |
| | | TGTKVTVL |
| 149369-nt | 1534 | GAAGTGCAGCTCCAACAGTCAGGACCGGGGCTCGTGAAGCCATCCCAG |
| ScFv | | ACCCTGTCCCTGACTTGTGCCATCTCGGGAGATAGCGTGTCATCGAAC |
| domain | | TCCGCCGCCTGGAACTGGATTCGGCAGAGCCCGTCCCGCGGACTGGAG |
| | | TGGCTTGGAAGGACCTACTACCGGTCCAAGTGGTACTCTTTCTACGCG |
| | | ATCTCGCTGAAGTCCCGCATTATCATTAACCCTGATACCTCCAAGAAT |
| | | CAGTTCTCCCTCCAACTGAAATCCGTCACCCCCGAGGACACAGCAGTG |
| | | TATTACTGCGCACGGAGCAGCCCCGAAGGACTGTTCCTGTATTGGTTT |
| | | GACCCCTGGGGCCAGGGGACTCTTGTGACCGTGTCGAGCGGCGGAGAT |
| | | GGGTCCGGTGGCGGTGGTTCGGGGGGCGGCGGATCATCATCCGAACTG |
| | | ACCCAGGACCCGGCTGTGTCCGTGGCGCTGGGACAAACCATCCGCATT |
| | | ACGTGCCAGGGAGACTCCCTGGGCAACTACTACGCCACTTGGTACCAG |
| | | CAGAAGCCGGGCCAAGCCCCTGTGTTGGTCATCTACGGGACCAACAAC |
| | | AGACCTTCCGGCATCCCCGACCGGTTCAGCGCTTCGTCCTCCGGCAAC |
| | | ACTGCCAGCCTGACCATCACTGGAGCGCAGGCCGAAGATGAGGCCGAC |
| | | TACTACTGCAACAGCAGAGACTCCTCGGGTCATCACCTCTTGTTCGGA |
| | | ACTGGAACCAAGGTCACCGTGCTG |
| 149369-aa | 1535 | EVQLQQSGPGLVKPSQTLSLTCAISGDSVSSNSAAWNWIRQSPSRGLE |
| VH | | WLGRTYYRSKWYSFYAISLKSRIIINPDTSKNQFSLQLKSVTPEDTAV |
| | | YYCARSSPEGLFLYWFDPWGQGTLVTVSS |
| 149369-aa | 1536 | SSELTQDPAVSVALGQTIRITCQGDSLGNYYATWYQQKPGQAPVLVIY |
| VL | | GTNNRPSGIPDRFSASSSGNTASLTITGAQAEDEADYYCNSRDSSGHH |
| | | LLFGTGTKVTVL |
| 149369-aa | 1537 | MALPVTALLLPLALLLHAARPEVQLQQSGPGLVKPSQTLSLTCAISGD |
| Full CAR | | SVSSNSAAWNWIRQSPSRGLEWLGRTYYRSKWYSFYAISLKSRIIINP |
| | | DTSKNQFSLQLKSVTPEDTAVYYCARSSPEGLFLYWFDPWGQGTLVTV |
| | | SSGGDGSGGGGSGGGGSSSELTQDPAVSVALGQTIRITCQGDSLGNYY |
| | | ATWYQQKPGQAPVLVIYGTNNRPSGIPDRFSASSSGNTASLTITGAQA |
| | | EDEADYYCNSRDSSGHHLLFGTGTKVTVLTTTPAPRPPTPAPTIASQP |
| | | LSLRPEACRPAAGGAVHTRGLDFACDIYIWAPLAGTCGVLLLSLVITL |
| | | YCKRGRKKLLYIFKQPFMRPVQTTQEEDGCSCRFPEEEEGGCELRVKF |
| | | SRSADAPAYKQGQNQLYNELNLGRREEYDVLDKRRGRDPEMGGKPRRK |
| | | NPQEGLYNELQKDKMAEAYSEIGMKGERRRGKGHDGLYQGLSTATKDT |
| | | YDALHMQALPPR |
| 149369-nt | 1538 | ATGGCCCTCCCTGTCACCGCCCTGCTGCTTCCGCTGGCTCTTCTGCTC |
| Full CAR | | CACGCCGCTCGGCCCGAAGTGCAGCTCCAACAGTCAGGACCGGGGCTC |
| | | GTGAAGCCATCCCAGACCCTGTCCCTGACTTGTGCCATCTCGGGAGAT |
| | | AGCGTGTCATCGAACTCCGCCGCCTGGAACTGGATTCGGCAGAGCCCG |
| | | TCCCGCGGACTGGAGTGGCTTGGAAGGACCTACTACCGGTCCAAGTGG |
| | | TACTCTTTCTACGCGATCTCGCTGAAGTCCCGCATTATCATTAACCCT |
| | | GATACCTCCAAGAATCAGTTCTCCCTCCAACTGAAATCCGTCACCCCC |
| | | GAGGACACAGCAGTGTATTACTGCGCACGGAGCAGCCCCGAAGGACTG |
| | | TTCCTGTATTGGTTTGACCCCTGGGGCCAGGGGACTCTTGTGACCGTG |
| | | TCGAGCGGCGGAGATGGGTCCGGTGGCGGTGGTTCGGGGGGCGGCGGA |
| | | TCATCATCCGAACTGACCCAGGACCCGGCTGTGTCCGTGGCGCTGGGA |
| | | CAAACCATCCGCATTACGTGCCAGGGAGACTCCCTGGGCAACTACTAC |
| | | GCCACTTGGTACCAGCAGAAGCCGGGCCAAGCCCCTGTGTTGGTCATC |
| | | TACGGGACCAACAACAGACCTTCCGGCATCCCCGACCGGTTCAGCGCT |
| | | TCGTCCTCCGGCAACACTGCCAGCCTGACCATCACTGGAGCGCAGGCC |
| | | GAAGATGAGGCCGACTACTACTGCAACAGCAGAGACTCCTCGGGTCAT |
| | | CACCTCTTGTTCGGAACTGGAACCAAGGTCACCGTGCTGACCACTACC |
| | | CCAGCACCGAGGCCACCCACCCCGGCTCCTACCATCGCCTCCCAGCCT |
| | | CTGTCCCTGCGTCCGGAGGCATGTAGACCCGCAGCTGGTGGGGCCGTG |
| | | CATACCCGGGGTCTTGACTTCGCCTGCGATATCTACATTTGGGCCCCT |
| | | CTGGCTGGTACTTGCGGGGTCCTGCTGCTTTCACTCGTGATCACTCTT |
| | | TACTGTAAGCGCGGTCGGAAGAAGCTGCTGTACATCTTTAAGCAACCC |
| | | TTCATGAGGCCTGTGCAGACTACTCAAGAGGAGGACGGCTGTTCATGC |
| | | CGGTTCCCAGAGGAGGAGGAAGGCGGCTGCGAACTGCGCGTGAAATTC |
| | | AGCCGCAGCGCAGATGCTCCAGCCTACAAGCAGGGGCAGAACCAGCTC |
| | | TACAACGAACTCAATCTTGGTCGGAGAGAGGAGTACGACGTGCTGGAC |
| | | AAGCGGAGAGGACGGGACCCAGAAATGGGCGGGAAGCCGCGCAGAAAG |
| | | AATCCCCAAGAGGGCCTGTACAACGAGCTCCAAAAGGATAAGATGGCA |
| | | GAAGCCTATAGCGAGATTGGTATGAAAGGGGAACGCAGAAGAGGCAAA |
| | | GGCCACGACGGACTGTACCAGGGACTCAGCACCGCCACCAAGGACACC |
| | | TATGACGCTCTTCACATGCAGGCCCTGCCGCCTCGG |

BCMA_EBB-C1978-A4

| | | |
|---|---|---|
| BCMA_EB | 1539 | EVQLVESGGGLVQPGGSLRLSCAASGFTFSSYAMSWVRQAPGKGLEWV |
| B-C1978-A4- | | SAISGSGGSTYYADSVKGRFTISRDNSKNTLYLQMNSLRAEDTAVYYC |
| aa | | AKVEGSGSLDYWGQGTLVTVSSGGGGSGGGGSGGGGSEIVMTQSPGTL |
| ScFv | | SLSPGERATLSCRASQSVSSAYLAWYQQKPGQPPRLLISGASTRATGI |
| domain | | PDRFGGSGSGTDFTLTISRLEPEDFAVYYCQHYGSSFNGSSLFTFGQG |
| | | TRLEIK |
| BCMA_EB | 1540 | GAAGTGCAGCTCGTGGAGTCAGGAGGCGGCCTGGTCCAGCCGGGAGGG |
| B-C1978-A4- | | TCCCTTAGACTGTCATGCGCCGCAAGCGGATTCACTTTCTCCTCCTAT |
| nt | | GCCATGAGCTGGGTCCGCCAAGCCCCCGGAAAGGGACTGGAATGGGTG |
| ScFv | | TCCGCCATCTCGGGGTCTGGAGGCTCAACTTACTACGCTGACTCCGTG |
| domain | | AAGGGACGGTTCACCATTAGCCGCGACAACTCCAAGAACACCCTCTAC |
| | | CTCCAAATGAACTCCCTGCGGGCCGAGGATACCGCCGTCTACTACTGC |
| | | GCCAAAGTGGAAGGTTCAGGATCGCTGGACTACTGGGGACAGGGTACT |
| | | CTCGTGACCGTGTCATCGGGCGGAGGAGGTTCCGGCGGTGGCGGCTCC |
| | | GGCGGCGGAGGGTCGGAGATCGTGATGACCCAGAGCCCTGGTACTCTG |
| | | AGCCTTTCGCCGGGAGAAAGGGCCACCCTGTCCTGCCGCGCTTCCCAA |
| | | TCCGTGTCCTCCGCGTACTTGGCGTGGTACCAGCAGAAGCCGGGACAG |
| | | CCCCCTCGGCTGCTGATCAGCGGGGCCAGCACCCGGGCAACCGGAATC |
| | | CCAGACAGATTCGGGGGTTCCGGCAGCGGCACAGATTTCACCCTGACT |
| | | ATTTCGAGGTTGGAGCCCGAGGACTTTGCGGTGTATTACTGTCAGCAC |
| | | TACGGGTCGTCCTTTAATGGCTCCAGCCTGTTCACGTTCGGACAGGGG |
| | | ACCCGCCTGGAAATCAAG |
| BCMA_EB | 1541 | EVQLVESGGGLVQPGGSLRLSCAASGFTFSSYAMSWVRQAPGKGLEWV |
| B-C1978-A4- | | SAISGSGGSTYYADSVKGRFTISRDNSKNTLYLQMNSLRAEDTAVYYC |
| aa | | AKVEGSGSLDYWGQGTLVTVSS |
| VH | | |
| BCMA_EB | 1542 | EIVMTQSPGTLSLSPGERATLSCRASQSVSSAYLAWYQQKPGQPPRLL |
| B-C1978-A4 | | ISGASTRATGIPDRFGGSGSGTDFTLTISRLEPEDFAVYYCQHYGSSF |
| -aa | | NGSSLFTFGQGTRLEIK |
| VL | | |
| BCMA_EB | 1543 | MALPVTALLLPLALLLHAARPEVQLVESGGGLVQPGGSLRLSCAASGF |
| B-C1978-A4- | | TFSSYAMSWVRQAPGKGLEWVSAISGSGGSTYYADSVKGRFTISRDNS |
| aa | | KNTLYLQMNSLRAEDTAVYYCAKVEGSGSLDYWGQGTLVTVSSGGGGS |
| Full CART | | GGGGSGGGGSEIVMTQSPGTLSLSPGERATLSCRASQSVSSAYLAWYQ |
| | | QKPGQPPRLLISGASTRATGIPDRFGGSGSGTDFTLTISRLEPEDFAV |
| | | YYCQHYGSSFNGSSLFTFGQGTRLEIKTTTPAPRPPTPAPTIASQPLS |
| | | LRPEACRPAAGGAVHTRGLDFACDIYIWAPLAGTCGVLLLSLVITLYC |
| | | KRGRKKLLYIFKQPFMRPVQTTQEEDGCSCRFPEEEEGGCELRVKFSR |
| | | SADAPAYKQGQNQLYNELNLGRREEYDVLDKRRGRDPEMGGKPRRKNP |
| | | QEGLYNELQKDKMAEAYSEIGMKGERRRGKGHDGLYQGLSTATKDTYD |
| | | ALHMQALPPR |
| BCMA_EB | 1544 | ATGGCCCTCCCTGTCACCGCCCTGCTGCTTCCGCTGGCTCTTCTGCTC |
| B-C1978-A4- | | CACGCCGCTCGGCCCGAAGTGCAGCTCGTGGAGTCAGGAGGCGGCCTG |
| nt | | GTCCAGCCGGGAGGGTCCCTTAGACTGTCATGCGCCGCAAGCGGATTC |
| Full CART | | ACTTTCTCCTCCTATGCCATGAGCTGGGTCCGCCAAGCCCCCGGAAAG |
| | | GGACTGGAATGGGTGTCCGCCATCTCGGGGTCTGGAGGCTCAACTTAC |
| | | TACGCTGACTCCGTGAAGGGACGGTTCACCATTAGCCGCGACAACTCC |
| | | AAGAACACCCTCTACCTCCAAATGAACTCCCTGCGGGCCGAGGATACC |
| | | GCCGTCTACTACTGCGCCAAAGTGGAAGGTTCAGGATCGCTGGACTAC |
| | | TGGGGACAGGGTACTCTCGTGACCGTGTCATCGGGCGGAGGAGGTTCC |
| | | GGCGGTGGCGGCTCCGGCGGCGGAGGGTCGGAGATCGTGATGACCCAG |
| | | AGCCCTGGTACTCTGAGCCTTTCGCCGGGAGAAAGGGCCACCCTGTCC |
| | | TGCCGCGCTTCCCAATCCGTGTCCTCCGCGTACTTGGCGTGGTACCAG |
| | | CAGAAGCCGGGACAGCCCCCTCGGCTGCTGATCAGCGGGGCCAGCACC |
| | | CGGGCAACCGGAATCCCAGACAGATTCGGGGGTTCCGGCAGCGGCACA |
| | | GATTTCACCCTGACTATTTCGAGGTTGGAGCCCGAGGACTTTGCGGTG |
| | | TATTACTGTCAGCACTACGGGTCGTCCTTTAATGGCTCCAGCCTGTTC |
| | | ACGTTCGGACAGGGGACCCGCCTGGAAATCAAGACCACTACCCCAGCA |
| | | CCGAGGCCACCCACCCCGGCTCCTACCATCGCCTCCCAGCCTCTGTCC |
| | | CTGCGTCCGGAGGCATGTAGACCCGCAGCTGGTGGGGCCGTGCATACC |
| | | CGGGGTCTTGACTTCGCCTGCGATATCTACATTTGGGCCCCTCTGGCT |
| | | GGTACTTGCGGGGTCCTGCTGCTTTCACTCGTGATCACTCTTTACTGT |
| | | AAGCGCGGTCGGAAGAAGCTGCTGTACATCTTTAAGCAACCCTTCATG |
| | | AGGCCTGTGCAGACTACTCAAGAGGAGGACGGCTGTTCATGCCGGTTC |
| | | CCAGAGGAGGAGGAAGGCGGCTGCGAACTGCGCGTGAAATTCAGCCGC |
| | | AGCGCAGATGCTCCAGCCTACAAGCAGGGGCAGAACCAGCTCTACAAC |
| | | GAACTCAATCTTGGTCGGAGAGAGGAGTACGACGTGCTGGACAAGCGG |
| | | AGAGGACGGGACCCAGAAATGGGCGGGAAGCCGCGCAGAAAGAATCCC |
| | | CAAGAGGGCCTGTACAACGAGCTCCAAAAGGATAAGATGGCAGAAGCC |
| | | TATAGCGAGATTGGTATGAAAGGGGAACGCAGAAGAGGCAAAGGCCAC |
| | | GACGGACTGTACCAGGGACTCAGCACCGCCACCAAGGACACCTATGAC |
| | | GCTCTTCACATGCAGGCCCTGCCGCCTCGG |

BCMA_EBB-C1978-G1

| | | |
|---|---|---|
| BCMA_EB | 1545 | EVQLVETGGGLVQPGGSLRLSCAASGITFSRYPMSWVRQAPGKG |
| B-C1978-G1- | | LEWVSGISDSGVSTYYADSAKGRFTISRDNSKNTLFLQMSSLRDE |
| aa | | DTAVYYCVTRAGSEASDIWGQGTMVTVSSGGGGSGGGGSGGG |
| ScFv | | GSEIVLTQSPATLSLSPGERATLSCRASQSVSNSLAWYQQKPGQA |
| domain | | PRLLIYDASSRATGIPDRFSGSGSGTDFTLTISRLEPEDFAIYYCQQ |
| | | FGTSSGLTFGGGTKLEIK |
| BCMA_EB | 1546 | GAAGTGCAACTGGTGGAAACCGGTGGCGGCCTGGTGCAGCCTGGAGGA |
| B-C1978-G1- | | TCATTGAGGCTGTCATGCGCGGCCAGCGGTATTACCTTCTCCCGGTAC |
| nt | | CCCATGTCCTGGGTCAGACAGGCCCCGGGGAAAGGGCTTGAATGGGTG |
| ScFv | | TCCGGGATCTCGGACTCCGGTGTCAGCACTTACTACGCCGACTCCGCC |
| domain | | AAGGGACGCTTCACCATTTCCCGGGACAACTCGAAGAACACCCTGTTC |
| | | CTCCAAATGAGCTCCCTCCGGGACGAGGATACTGCAGTGTACTACTGC |
| | | GTGACCCGCGCCGGGTCCGAGGCGTCTGACATTTGGGGACAGGGCACT |
| | | ATGGTCACCGTGTCGTCCGGCGGAGGGGGCTCGGGAGGCGGTGGCAGC |
| | | GGAGGAGGAGGGTCCGAGATCGTGCTGACCCAATCCCCGGCCACCCTC |
| | | TCGCTGAGCCCTGGAGAAAGGGCAACCTTGTCCTGTCGCGCGAGCCAG |
| | | TCCGTGAGCAACTCCCTGGCCTGGTACCAGCAGAAGCCCGGACAGGCT |
| | | CCGAGACTTCTGATCTACGACGCTTCGAGCCGGGCCACTGGAATCCCC |
| | | GACCGCTTTTCGGGGTCCGGCTCAGGAACCGATTTCACCCTGACAATC |
| | | TCACGGCTGGAGCCAGAGGATTTCGCCATCTATTACTGCCAGCAGTTC |
| | | GGTACTTCCTCCGGCCTGACTTTCGGAGGCGGCACGAAGCTCGAAATC |
| | | AAG |
| BCMA_EB | 1547 | EVQLVETGGGLVQPGGSLRLSCAASGITFSRYPMSWVRQAPGKGLEWV |
| B-C1978-G1- | | SGISDSGVSTYYADSAKGRFTISRDNSKNTLFLQMSSLRDEDTAVYYC |
| aa | | VTRAGSEASDIWGQGTMVTVSS |
| VH | | |
| BCMA_EB | 1548 | EIVLTQSPATLSLSPGERATLSCRASQSVSNSLAWYQQKPGQAPRLLI |
| B-C1978-G1- | | YDASSRATGIPDRFSGSGSGTDFTLTISRLEPEDFAIYYCQQFGTSSG |
| aa | | LTFGGGTKLEIK |
| VL | | |
| BCMA_EB | 1549 | MALPVTALLLPLALLLHAARPEVQLVETGGGLVQPGGSLRLSCA |
| B-C1978-G1- | | ASGITFSRYPMSWVRQAPGKGLEWVSGISDSGVSTYYADSAKGR |
| aa | | FTISRDNSKNTLFLQMSSLRDEDTAVYYCVTRAGSEASDIWGQG |
| Full CART | | TMVTVSSGGGGSGGGGSGGGGSEIVLTQSPATLSLSPGERATLSC |
| | | RASQSVSNSLAWYQQKPGQAPRLLIYDASSRATGIPDRFSGSGSG |
| | | TDFTLTISRLEPEDFAIYYCQQFGTSSGLTFGGGTKLEIKTTTPAPR |
| | | PPTPAPTIASQPLSLRPEACRPAAGGAVHTRGLDFACDIYIWAPL |
| | | AGTCGVLLLSLVITLYCKRGRKKLLYIFKQPFMRPVQTTQEEDG |
| | | CSCRFPEEEEGGCELRVKFSRSADAPAYKQGQNQLYNELNLGRR |
| | | EEYDVLDKRRGRDPEMGGKPRRKNPQEGLYNELQKDKMAEAY |
| | | SEIGMKGERRRGKGHDGLYQGLSTATKDTYDALHMQALPPR |
| BCMA_EB | 1550 | ATGGCCCTCCCTGTCACCGCCCTGCTGCTTCCGCTGGCTCTTCTGCTC |
| B-C1978-G1- | | CACGCCGCTCGGCCCGAAGTGCAACTGGTGGAAACCGGTGGCGGCCTG |
| nt | | GTGCAGCCTGGAGGATCATTGAGGCTGTCATGCGCGGCCAGCGGTATT |
| Full CART | | ACCTTCTCCCGGTACCCCATGTCCTGGGTCAGACAGGCCCCGGGGAAA |
| | | GGGCTTGAATGGGTGTCCGGGATCTCGGACTCCGGTGTCAGCACTTAC |
| | | TACGCCGACTCCGCCAAGGGACGCTTCACCATTTCCCGGGACAACTCG |
| | | AAGAACACCCTGTTCCTCCAAATGAGCTCCCTCCGGGACGAGGATACT |
| | | GCAGTGTACTACTGCGTGACCCGCGCCGGGTCCGAGGCGTCTGACATT |
| | | TGGGGACAGGGCACTATGGTCACCGTGTCGTCCGGCGGAGGGGGCTCG |
| | | GGAGGCGGTGGCAGCGGAGGAGGAGGGTCCGAGATCGTGCTGACCCAA |
| | | TCCCCGGCCACCCTCTCGCTGAGCCCTGGAGAAAGGGCAACCTTGTCC |
| | | TGTCGCGCGAGCCAGTCCGTGAGCAACTCCCTGGCCTGGTACCAGCAG |
| | | AAGCCCGGACAGGCTCCGAGACTTCTGATCTACGACGCTTCGAGCCGG |
| | | GCCACTGGAATCCCCGACCGCTTTTCGGGGTCCGGCTCAGGAACCGAT |
| | | TTCACCCTGACAATCTCACGGCTGGAGCCAGAGGATTTCGCCATCTAT |
| | | TACTGCCAGCAGTTCGGTACTTCCTCCGGCCTGACTTTCGGAGGCGGC |
| | | ACGAAGCTCGAAATCAAGACCACTACCCCAGCACCGAGGCCACCCACC |
| | | CCGGCTCCTACCATCGCCTCCCAGCCTCTGTCCCTGCGTCCGGAGGCA |
| | | TGTAGACCCGCAGCTGGTGGGGCCGTGCATACCCGGGGTCTTGACTTC |
| | | GCCTGCGATATCTACATTTGGGCCCCTCTGGCTGGTACTTGCGGGGTC |
| | | CTGCTGCTTTCACTCGTGATCACTCTTTACTGTAAGCGCGGTCGGAAG |
| | | AAGCTGCTGTACATCTTTAAGCAACCCTTCATGAGGCCTGTGCAGACT |
| | | ACTCAAGAGGAGGACGGCTGTTCATGCCGGTTCCCAGAGGAGGAGGAA |
| | | GGCGGCTGCGAACTGCGCGTGAAATTCAGCCGCAGCGCAGATGCTCCA |
| | | GCCTACAAGCAGGGGCAGAACCAGCTCTACAACGAACTCAATCTTGGT |
| | | CGGAGAGAGGAGTACGACGTGCTGGACAAGCGGAGAGGACGGGACCCA |
| | | GAAATGGGCGGGAAGCCGCGCAGAAAGAATCCCCAAGAGGGCCTGTAC |
| | | AACGAGCTCCAAAAGGATAAGATGGCAGAAGCCTATAGCGAGATTGGT |
| | | ATGAAAGGGGAACGCAGAAGAGGCAAAGGCCACGACGGACTGTACCAG |
| | | GGACTCAGCACCGCCACCAAGGACACCTATGACGCTCTTCACATGCAG |
| | | GCCCTGCCGCCTCGG |

BCMA_EBB-C1979-C1

| | | |
|---|---|---|
| BCMA_EB | 1551 | QVQLVESGGGLVQPGGSLRLSCAASGFTFSSYAMSWVRQAPGKGLEWV |
| B-C1979-C1- | | SAISGSGGSTYYADSVKGRFTISRDNAKNSLYLQMNSLRAEDTAIYYC |
| aa | | ARATYKRELRYYYGMDVWGQGTMVTVSSGGGGSGGGGSGGGGSEIVMT |
| ScFv | | QSPGTVSLSPGERATLSCRASQSVSSSFLAWYQQKPGQAPRLLIYGAS |
| domain | | SRATGIPDRFSGSGSGTDFTLTISRLEPEDSAVYYCQQYHSSPSWTFG |
| | | QGTRLEIK |
| BCMA_EB | 1552 | CAAGTGCAGCTCGTGGAATCGGGTGGCGGACTGGTGCAGCCGGGGGGC |
| B-C1979-C1- | | TCACTTAGACTGTCCTGCGCGGCCAGCGGATTCACTTTCTCCTCCTAC |
| nt | | GCCATGTCCTGGGTCAGACAGGCCCCTGGAAAGGGCCTGGAATGGGTG |
| ScFv | | TCCGCAATCAGCGGCAGCGGCGGCTCGACCTATTACGCGGATTCAGTG |
| domain | | AAGGGCAGATTCACCATTTCCCGGGACAACGCCAAGAACTCCTTGTAC |
| | | CTTCAAATGAACTCCCTCCGCGCGGAAGATACCGCAATCTACTACTGC |
| | | GCTCGGGCCACTTACAAGAGGGAACTGCGCTACTACTACGGGATGGAC |
| | | GTCTGGGGCCAGGGAACCATGGTCACCGTGTCCAGCGGAGGAGGAGGA |
| | | TCGGGAGGAGGCGGTAGCGGGGGTGGAGGGTCGGAGATCGTGATGACC |
| | | CAGTCCCCCGGCACTGTGTCGCTGTCCCCCGGCGAACGGGCCACCCTG |
| | | TCATGTCGGGCCAGCCAGTCAGTGTCGTCAAGCTTCCTCGCCTGGTAC |
| | | CAGCAGAAACCGGGACAAGCTCCCCGCCTGCTGATCTACGGAGCCAGC |
| | | AGCCGGGCCACCGGTATTCCTGACCGGTTCTCCGGTTCGGGGTCCGGG |
| | | ACCGACTTTACTCTGACTATCTCTCGCCTCGAGCCAGAGGACTCCGCC |
| | | GTGTATTACTGCCAGCAGTACCACTCCTCCCCGTCCTGGACGTTCGGA |
| | | CAGGGCACAAGGCTGGAGATTAAG |
| BCMA_EB | 1553 | QVQLVESGGGLVQPGGSLRLSCAASGFTFSSYAMSWVRQAPGKGLEWV |
| B-C1979-C1- | | SAISGSGGSTYYADSVKGRFTISRDNAKNSLYLQMNSLRAEDTAIYYC |
| aa | | ARATYKRELRYYYGMDVWGQGTMVTVSS |
| VH | | |
| BCMA_EB | 1554 | EIVMTQSPGTVSLSPGERATLSCRASQSVSSSFLAWYQQKPGQAPRLL |
| B-C1979-C1- | | IYGASSRATGIPDRFSGSGSGTDFTLTISRLEPEDSAVYYCQQYHSSP |
| aa | | SWTFGQGTRLEIK |
| VL | | |
| BCMA_EB | 1555 | MALPVTALLLPLALLLHAARPQVQLVESGGGLVQPGGSLRLSCAASGF |
| B-C1979-C1- | | TFSSYAMSWVRQAPGKGLEWVSAISGSGGSTYYADSVKGRFTISRDNA |
| aa | | KNSLYLQMNSLRAEDTAIYYCARATYKRELRYYYGMDVWGQGTMVTVS |
| Full CART | | SGGGGSGGGGSGGGGSEIVMTQSPGTVSLSPGERATLSCRASQSVSSS |
| | | FLAWYQQKPGQAPRLLIYGASSRATGIPDRFSGSGSGTDFTLTISRLE |
| | | PEDSAVYYCQQYHSSPSWTFGQGTRLEIKTTTPAPRPPTPAPTIASQP |
| | | LSLRPEACRPAAGGAVHTRGLDFACDIYIWAPLAGTCGVLLLSLVITL |
| | | YCKRGRKKLLYIFKQPFMRPVQTTQEEDGCSCRFPEEEEGGCELRVKF |
| | | SRSADAPAYKQGQNQLYNELNLGRREEYDVLDKRRGRDPEMGGKPRRK |
| | | NPQEGLYNELQKDKMAEAYSEIGMKGERRRGKGHDGLYQGLSTATKDT |
| | | YDALHMQALPPR |
| BCMA_EB | 1556 | ATGGCCCTCCCTGTCACCGCCCTGCTGCTTCCGCTGGCTCTTCTGCTC |
| B-C1979-C1- | | CACGCCGCTCGGCCCCAAGTGCAGCTCGTGGAATCGGGTGGCGGACTG |
| nt | | GTGCAGCCGGGGGGCTCACTTAGACTGTCCTGCGCGGCCAGCGGATTC |
| Full CART | | ACTTTCTCCTCCTACGCCATGTCCTGGGTCAGACAGGCCCCTGGAAAG |
| | | GGCCTGGAATGGGTGTCCGCAATCAGCGGCAGCGGCGGCTCGACCTAT |
| | | TACGCGGATTCAGTGAAGGGCAGATTCACCATTTCCCGGGACAACGCC |
| | | AAGAACTCCTTGTACCTTCAAATGAACTCCCTCCGCGCGGAAGATACC |
| | | GCAATCTACTACTGCGCTCGGGCCACTTACAAGAGGGAACTGCGCTAC |
| | | TACTACGGGATGGACGTCTGGGGCCAGGGAACCATGGTCACCGTGTCC |
| | | AGCGGAGGAGGAGGATCGGGAGGAGGCGGTAGCGGGGGTGGAGGGTCG |
| | | GAGATCGTGATGACCCAGTCCCCCGGCACTGTGTCGCTGTCCCCCGGC |
| | | GAACGGGCCACCCTGTCATGTCGGGCCAGCCAGTCAGTGTCGTCAAGC |
| | | TTCCTCGCCTGGTACCAGCAGAAACCGGGACAAGCTCCCCGCCTGCTG |
| | | ATCTACGGAGCCAGCAGCCGGGCCACCGGTATTCCTGACCGGTTCTCC |
| | | GGTTCGGGGTCCGGGACCGACTTTACTCTGACTATCTCTCGCCTCGAG |
| | | CCAGAGGACTCCGCCGTGTATTACTGCCAGCAGTACCACTCCTCCCCG |
| | | TCCTGGACGTTCGGACAGGGCACAAGGCTGGAGATTAAGACCACTACC |
| | | CCAGCACCGAGGCCACCCACCCCGGCTCCTACCATCGCCTCCCAGCCT |
| | | CTGTCCCTGCGTCCGGAGGCATGTAGACCCGCAGCTGGTGGGGCCGTG |
| | | CATACCCGGGGTCTTGACTTCGCCTGCGATATCTACATTTGGGCCCCT |
| | | CTGGCTGGTACTTGCGGGGTCCTGCTGCTTTCACTCGTGATCACTCTT |
| | | TACTGTAAGCGCGGTCGGAAGAAGCTGCTGTACATCTTTAAGCAACCC |
| | | TTCATGAGGCCTGTGCAGACTACTCAAGAGGAGGACGGCTGTTCATGC |
| | | CGGTTCCCAGAGGAGGAGGAAGGCGGCTGCGAACTGCGCGTGAAATTC |
| | | AGCCGCAGCGCAGATGCTCCAGCCTACAAGCAGGGGCAGAACCAGCTC |
| | | TACAACGAACTCAATCTTGGTCGGAGAGAGGAGTACGACGTGCTGGAC |
| | | AAGCGGAGAGGACGGGACCCAGAAATGGGCGGGAAGCCGCGCAGAAAG |
| | | AATCCCCAAGAGGGCCTGTACAACGAGCTCCAAAAGGATAAGATGGCA |
| | | GAAGCCTATAGCGAGATTGGTATGAAAGGGGAACGCAGAAGAGGCAAA |
| | | GGCCACGACGGACTGTACCAGGGACTCAGCACCGCCACCAAGGACACC |
| | | TATGACGCTCTTCACATGCAGGCCCTGCCGCCTCGG |

BCMA_EBB-C1978-C7

| | | |
|---|---|---|
| BCMA_EB | 1557 | EVQLVETGGGLVQPGGSLRLSCAASGFTFSSYAMSWVRQAPGKGLEWV |
| B-C1978-C7- | | SAISGSGGSTYYADSVKGRFTISRDNSKNTLYLQMNTLKAEDTAVYYC |
| aa | | ARATYKRELRYYYGMDVWGQGTTVTVSSGGGGSGGGGSGGGGSEIVLT |
| ScFv | | QSPSTLSLSPGESATLSCRASQSVSTTFLAWYQQKPGQAPRLLIYGSS |
| domain | | NRATGIPDRFSGSGSGTDFTLTIRRLEPEDFAVYYCQQYHSSPSWTFG |
| | | QGTKVEIK |
| BCMA_EB | 1558 | GAGGTGCAGCTTGTGGAAACCGGTGGCGGACTGGTGCAGCCCGGAGGA |
| B-C1978-C7- | | AGCCTCAGGCTGTCCTGCGCCGCGTCCGGCTTCACCTTCTCCTCGTAC |
| nt | | GCCATGTCCTGGGTCCGCCAGGCCCCCGGAAAGGGCCTGGAATGGGTG |
| ScFv | | TCCGCCATCTCTGGAAGCGGAGGTTCCACGTACTACGCGGACAGCGTC |
| domain | | AAGGGAAGGTTCACAATCTCCCGCGATAATTCGAAGAACACTCTGTAC |
| | | CTTCAAATGAACACCCTGAAGGCCGAGGACACTGCTGTGTACTACTGC |
| | | GCACGGGCCACCTACAAGAGAGAGCTCCGGTACTACTACGGAATGGAC |
| | | GTCTGGGGCCAGGGAACTACTGTGACCGTGTCCTCGGGAGGGGGTGGC |
| | | TCCGGGGGGGGCGGCTCCGGCGGAGGCGGTTCCGAGATTGTGCTGACC |
| | | CAGTCACCTTCAACTCTGTCGCTGTCCCCGGGAGAGAGCGCTACTCTG |
| | | AGCTGCCGGGCCAGCCAGTCCGTGTCCACCACCTTCCTCGCCTGGTAT |
| | | CAGCAGAAGCCGGGGCAGGCACCACGGCTCTTGATCTACGGGTCAAGC |
| | | AACAGAGCGACCGGAATTCCTGACCGCTTCTCGGGGAGCGGTTCAGGC |
| | | ACCGACTTCACCCTGACTATCCGGCGCCTGGAACCCGAAGATTTCGCC |
| | | GTGTATTACTGTCAACAGTACCACTCCTCGCCGTCCTGGACCTTTGGC |
| | | CAAGGAACCAAAGTGGAAATCAAG |
| BCMA_EB | 1559 | EVQLVETGGGLVQPGGSLRLSCAASGFTFSSYAMSWVRQAPGKGLEWV |
| B-C1978-C7- | | SAISGSGGSTYYADSVKGRFTISRDNSKNTLYLQMNTLKAEDTAVYYC |
| aa | | ARATYKRELRYYYGMDVWGQGTTVTVSS |
| VH | | |
| BCMA_EB | 1560 | EIVLTQSPSTLSLSPGESATLSCRASQSVSTTFLAWYQQKPGQAPRLL |
| B-C1978-C7- | | IYGSSNRATGIPDRFSGSGSGTDFTLTIRRLEPEDFAVYYCQQYHSSP |
| aa | | SWTFGQGTKVEIK |
| VL | | |
| BCMA_EB | 1561 | MALPVTALLLPLALLLHAARPEVQLVETGGGLVQPGGSLRLSCAASGF |
| B-C1978-C7- | | TFSSYAMSWVRQAPGKGLEWVSAISGSGGSTYYADSVKGRFTISRDNS |
| aa | | KNTLYLQMNTLKAEDTAVYYCARATYKRELRYYYGMDVWGQGTTVTVS |
| Full CART | | SGGGGSGGGGSGGGGSEIVLTQSPSTLSLSPGESATLSCRASQSVSTT |
| | | FLAWYQQKPGQAPRLLIYGSSNRATGIPDRFSGSGSGTDFTLTIRRLE |
| | | PEDFAVYYCQQYHSSPSWTFGQGTKVEIKTTTPAPRPPTPAPTIASQP |
| | | LSLRPEACRPAAGGAVHTRGLDFACDIYIWAPLAGTCGVLLLSLVITL |
| | | YCKRGRKKLLYIFKQPFMRPVQTTQEEDGCSCRFPEEEEGGCELRVKF |
| | | SRSADAPAYKQGQNQLYNELNLGRREEYDVLDKRRGRDPEMGGKPRRK |
| | | NPQEGLYNELQKDKMAEAYSEIGMKGERRRGKGHDGLYQGLSTATKDT |
| | | YDALHMQALPPR |
| BCMA_EB | 1562 | ATGGCCCTCCCTGTCACCGCCCTGCTGCTTCCGCTGGCTCTTCTGCTC |
| B-C1978-C7- | | CACGCCGCTCGGCCCGAGGTGCAGCTTGTGGAAACCGGTGGCGGACTG |
| nt | | GTGCAGCCCGGAGGAAGCCTCAGGCTGTCCTGCGCCGCGTCCGGCTTC |
| Full CART | | ACCTTCTCCTCGTACGCCATGTCCTGGGTCCGCCAGGCCCCCGGAAAG |
| | | GGCCTGGAATGGGTGTCCGCCATCTCTGGAAGCGGAGGTTCCACGTAC |
| | | TACGCGGACAGCGTCAAGGGAAGGTTCACAATCTCCCGCGATAATTCG |
| | | AAGAACACTCTGTACCTTCAAATGAACACCCTGAAGGCCGAGGACACT |
| | | GCTGTGTACTACTGCGCACGGGCCACCTACAAGAGAGAGCTCCGGTAC |
| | | TACTACGGAATGGACGTCTGGGGCCAGGGAACTACTGTGACCGTGTCC |
| | | TCGGGAGGGGGTGGCTCCGGGGGGGGCGGCTCCGGCGGAGGCGGTTCC |
| | | GAGATTGTGCTGACCCAGTCACCTTCAACTCTGTCGCTGTCCCCGGGA |
| | | GAGAGCGCTACTCTGAGCTGCCGGGCCAGCCAGTCCGTGTCCACCACC |
| | | TTCCTCGCCTGGTATCAGCAGAAGCCGGGGCAGGCACCACGGCTCTTG |
| | | ATCTACGGGTCAAGCAACAGAGCGACCGGAATTCCTGACCGCTTCTCG |
| | | GGGAGCGGTTCAGGCACCGACTTCACCCTGACTATCCGGCGCCTGGAA |
| | | CCCGAAGATTTCGCCGTGTATTACTGTCAACAGTACCACTCCTCGCCG |
| | | TCCTGGACCTTTGGCCAAGGAACCAAAGTGGAAATCAAGACCACTACC |
| | | CCAGCACCGAGGCCACCCACCCCGGCTCCTACCATCGCCTCCCAGCCT |
| | | CTGTCCCTGCGTCCGGAGGCATGTAGACCCGCAGCTGGTGGGGCCGTG |
| | | CATACCCGGGGTCTTGACTTCGCCTGCGATATCTACATTTGGGCCCCT |
| | | CTGGCTGGTACTTGCGGGGTCCTGCTGCTTTCACTCGTGATCACTCTT |
| | | TACTGTAAGCGCGGTCGGAAGAAGCTGCTGTACATCTTTAAGCAACCC |
| | | TTCATGAGGCCTGTGCAGACTACTCAAGAGGAGGACGGCTGTTCATGC |
| | | CGGTTCCCAGAGGAGGAGGAAGGCGGCTGCGAACTGCGCGTGAAATTC |
| | | AGCCGCAGCGCAGATGCTCCAGCCTACAAGCAGGGGCAGAACCAGCTC |
| | | TACAACGAACTCAATCTTGGTCGGAGAGAGGAGTACGACGTGCTGGAC |
| | | AAGCGGAGAGGACGGGACCCAGAAATGGGCGGGAAGCCGCGCAGAAAG |
| | | AATCCCCAAGAGGGCCTGTACAACGAGCTCCAAAAGGATAAGATGGCA |
| | | GAAGCCTATAGCGAGATTGGTATGAAAGGGGAACGCAGAAGAGGCAAA |
| | | GGCCACGACGGACTGTACCAGGGACTCAGCACCGCCACCAAGGACACC |
| | | TATGACGCTCTTCACATGCAGGCCCTGCCGCCTCGG |

BCMA_EBB-C1978-D10

| | | |
|---|---|---|
| BCMA_EB | 1563 | EVQLVETGGGLVQPGRSLRLSCAASGFTFDDYAMHWVRQAPGKGLEWV |
| B-C1978- | | SGISWNSGSIGYADSVKGRFTISRDNAKNSLYLQMNSLRDEDTAVYYC |
| D10-aa | | ARVGKAVPDVWGQGTTVTVSSGGGGSGGGGSGGGGSDIVMTQTPSSLS |
| ScFv | | ASVGDRVTITCRASQSISSYLNWYQQKPGKAPKLLIYAASSLQSGVPS |
| domain | | RFSGSGSGTDFTLTISSLQPEDFATYYCQQSYSTPYSFGQGTRLEIK |
| BCMA_EB | 1564 | GAAGTGCAGCTCGTGGAAACTGGAGGTGGACTCGTGCAGCCTGGACGG |
| B-C1978- | | TCGCTGCGGCTGAGCTGCGCTGCATCCGGCTTCACCTTCGACGATTAT |
| D10-nt | | GCCATGCACTGGGTCAGACAGGCGCCAGGGAAGGGACTTGAGTGGGTG |
| ScFv | | TCCGGTATCAGCTGGAATAGCGGCTCAATCGGATACGCGGACTCCGTG |
| domain | | AAGGGAAGGTTCACCATTTCCCGCGACAACGCCAAGAACTCCCTGTAC |
| | | TTGCAAATGAACAGCCTCCGGGATGAGGACACTGCCGTGTACTACTGC |
| | | GCCCGCGTCGGAAAAGCTGTGCCCGACGTCTGGGGCCAGGGAACCACT |
| | | GTGACCGTGTCCAGCGGCGGGGGTGGATCGGGCGGTGGAGGGTCCGGT |
| | | GGAGGGGGCTCAGATATTGTGATGACCCAGACCCCCTCGTCCCTGTCC |
| | | GCCTCGGTCGGCGACCGCGTGACTATCACATGTAGAGCCTCGCAGAGC |
| | | ATCTCCAGCTACCTGAACTGGTATCAGCAGAAGCCGGGGAAGGCCCCG |
| | | AAGCTCCTGATCTACGCGGCATCATCACTGCAATCGGGAGTGCCGAGC |
| | | CGGTTTTCCGGGTCCGGCTCCGGCACCGACTTCACGCTGACCATTTCT |
| | | TCCCTGCAACCCGAGGACTTCGCCACTTACTACTGCCAGCAGTCCTAC |
| | | TCCACCCCTTACTCCTTCGGCCAAGGAACCAGGCTGGAAATCAAG |
| BCMA_EB | 1565 | EVQLVETGGGLVQPGRSLRLSCAASGFTFDDYAMHWVRQAPGKGLEWV |
| B-C1978- | | SGISWNSGSIGYADSVKGRFTISRDNAKNSLYLQMNSLRDEDTAVYYC |
| D10-aa | | ARVGKAVPDVWGQGTTVTVSS |
| VH | | |
| BCMA_EB | 1566 | DIVMTQTPSSLSASVGDRVTITCRASQSISSYLNWYQQKPGKAPKLLI |
| B-C1978- | | YAASSLQSGVPSRFSGSGSGTDFTLTISSLQPEDFATYYCQQSYSTPY |
| D10-aa | | SFGQGTRLEIK |
| VL | | |
| BCMA_EB | 1567 | MALPVTALLLPLALLLHAARPEVQLVETGGGLVQPGRSLRLSCAASGF |
| B-C1978- | | TFDDYAMHWVRQAPGKGLEWVSGISWNSGSIGYADSVKGRFTISRDNA |
| D10-aa | | KNSLYLQMNSLRDEDTAVYYCARVGKAVPDVWGQGTTVTVSSGGGGSG |
| Full CART | | GGGSGGGGSDIVMTQTPSSLSASVGDRVTITCRASQSISSYLNWYQQK |
| | | PGKAPKLLIYAASSLQSGVPSRFSGSGSGTDFTLTISSLQPEDFATYY |
| | | CQQSYSTPYSFGQGTRLEIKTTTPAPRPPTPAPTIASQPLSLRPEACR |
| | | PAAGGAVHTRGLDFACDIYIWAPLAGTCGVLLLSLVITLYCKRGRKKL |
| | | LYIFKQPFMRPVQTTQEEDGCSCRFPEEEEGGCELRVKFSRSADAPAY |
| | | KQGQNQLYNELNLGRREEYDVLDKRRGRDPEMGGKPRRKNPQEGLYNE |
| | | LQKDKMAEAYSEIGMKGERRRGKGHDGLYQGLSTATKDTYDALHMQAL |
| | | PPR |
| BCMA_EB | 1568 | ATGGCCCTCCCTGTCACCGCCCTGCTGCTTCCGCTGGCTCTTCTGCTC |
| B-C1978- | | CACGCCGCTCGGCCCGAAGTGCAGCTCGTGGAAACTGGAGGTGGACTC |
| D10-nt | | GTGCAGCCTGGACGGTCGCTGCGGCTGAGCTGCGCTGCATCCGGCTTC |
| Full CART | | ACCTTCGACGATTATGCCATGCACTGGGTCAGACAGGCGCCAGGGAAG |
| | | GGACTTGAGTGGGTGTCCGGTATCAGCTGGAATAGCGGCTCAATCGGA |
| | | TACGCGGACTCCGTGAAGGGAAGGTTCACCATTTCCCGCGACAACGCC |
| | | AAGAACTCCCTGTACTTGCAAATGAACAGCCTCCGGGATGAGGACACT |
| | | GCCGTGTACTACTGCGCCCGCGTCGGAAAAGCTGTGCCCGACGTCTGG |
| | | GGCCAGGGAACCACTGTGACCGTGTCCAGCGGCGGGGGTGGATCGGGC |
| | | GGTGGAGGGTCCGGTGGAGGGGGCTCAGATATTGTGATGACCCAGACC |
| | | CCCTCGTCCCTGTCCGCCTCGGTCGGCGACCGCGTGACTATCACATGT |
| | | AGAGCCTCGCAGAGCATCTCCAGCTACCTGAACTGGTATCAGCAGAAG |
| | | CCGGGGAAGGCCCCGAAGCTCCTGATCTACGCGGCATCATCACTGCAA |
| | | TCGGGAGTGCCGAGCCGGTTTTCCGGGTCCGGCTCCGGCACCGACTTC |
| | | ACGCTGACCATTTCTTCCCTGCAACCCGAGGACTTCGCCACTTACTAC |
| | | TGCCAGCAGTCCTACTCCACCCCTTACTCCTTCGGCCAAGGAACCAGG |
| | | CTGGAAATCAAGACCACTACCCCAGCACCGAGGCCACCCACCCCGGCT |
| | | CCTACCATCGCCTCCCAGCCTCTGTCCCTGCGTCCGGAGGCATGTAGA |
| | | CCCGCAGCTGGTGGGGCCGTGCATACCCGGGGTCTTGACTTCGCCTGC |
| | | GATATCTACATTTGGGCCCCTCTGGCTGGTACTTGCGGGGTCCTGCTG |
| | | CTTTCACTCGTGATCACTCTTTACTGTAAGCGCGGTCGGAAGAAGCTG |
| | | CTGTACATCTTTAAGCAACCCTTCATGAGGCCTGTGCAGACTACTCAA |
| | | GAGGAGGACGGCTGTTCATGCCGGTTCCCAGAGGAGGAGGAAGGCGGC |
| | | TGCGAACTGCGCGTGAAATTCAGCCGCAGCGCAGATGCTCCAGCCTAC |
| | | AAGCAGGGGCAGAACCAGCTCTACAACGAACTCAATCTTGGTCGGAGA |
| | | GAGGAGTACGACGTGCTGGACAAGCGGAGAGGACGGGACCCAGAAATG |
| | | GGCGGGAAGCCGCGCAGAAAGAATCCCCAAGAGGGCCTGTACAACGAG |
| | | CTCCAAAAGGATAAGATGGCAGAAGCCTATAGCGAGATTGGTATGAAA |
| | | GGGGAACGCAGAAGAGGCAAAGGCCACGACGGACTGTACCAGGGACTC |
| | | AGCACCGCCACCAAGGACACCTATGACGCTCTTCACATGCAGGCCCTG |
| | | CCGCCTCGG |

BCMA_EBB-C1979-C12

| | | |
|---|---|---|
| BCMA_EB | 1569 | EVQLVESGGGLVQPGRSLRLSCTASGFTFDDYAMHWVRQRPGKGLEWV |
| B-C1979- | | ASINWKGNSLAYGDSVKGRFAISRDNAKNTVFLQMNSLRTEDTAVYYC |
| C12-aa | | ASHQGVAYYNYAMDVWGRGTLVTVSSGGGGSGGGGSGGGGSEIVLTQS |
| ScFv | | PGTLSLSPGERATLSCRATQSIGSSFLAWYQQRPGQAPRLLIYGASQR |
| domain | | ATGIPDRFSGRGSGTDFTLTISRVEPEDSAVYYCQHYESSPSWTFGQG |
| | | TKVEIK |
| BCMA_EB | 1570 | GAAGTGCAGCTCGTGGAGAGCGGGGGAGGATTGGTGCAGCCCGGAAGG |
| B-C1979- | | TCCCTGCGGCTCTCCTGCACTGCGTCTGGCTTCACCTTCGACGACTAC |
| C12-nt | | GCGATGCACTGGGTCAGACAGCGCCCGGGAAAGGGCCTGGAATGGGTC |
| ScFv | | GCCTCAATCAACTGGAAGGGAAACTCCCTGGCCTATGGCGACAGCGTG |
| domain | | AAGGGCCGCTTCGCCATTTCGCGCGACAACGCCAAGAACACCGTGTTT |
| | | CTGCAAATGAATTCCCTGCGGACCGAGGATACCGCTGTGTACTACTGC |
| | | GCCAGCCACCAGGGCGTGGCATACTATAACTACGCCATGGACGTGTGG |
| | | GGAAGAGGGACGCTCGTCACCGTGTCCTCCGGGGGCGGTGGATCGGGT |
| | | GGAGGAGGAAGCGGTGGCGGGGGCAGCGAAATCGTGCTGACTCAGAGC |
| | | CCGGGAACTCTTTCACTGTCCCCGGGAGAACGGGCCACTCTCTCGTGC |
| | | CGGGCCACCCAGTCCATCGGCTCCTCCTTCCTTGCCTGGTACCAGCAG |
| | | AGGCCAGGACAGGCGCCCCGCCTGCTGATCTACGGTGCTTCCCAACGC |
| | | GCCACTGGCATTCCTGACCGGTTCAGCGGCAGAGGGTCGGGAACCGAT |
| | | TTCACACTGACCATTTCCCGGGTGGAGCCCGAAGATTCGGCAGTCTAC |
| | | TACTGTCAGCATTACGAGTCCTCCCCTTCATGGACCTTCGGTCAAGGG |
| | | ACCAAAGTGGAGATCAAG |
| BCMA_EB | 1571 | EVQLVESGGGLVQPGRSLRLSCTASGFTFDDYAMHWVRQRPGKGLEWV |
| B-C1979- | | ASINWKGNSLAYGDSVKGRFAISRDNAKNTVFLQMNSLRTEDTAVYYC |
| C12-aa | | ASHQGVAYYNYAMDVWGRGTLVTVSS |
| VH | | |
| BCMA_EB | 1572 | EIVLTQSPGTLSLSPGERATLSCRATQSIGSSFLAWYQQRPGQAPRLL |
| B-C1979- | | IYGASQRATGIPDRFSGRGSGTDFTLTISRVEPEDSAVYYCQHYESSP |
| C12-aa | | SWTFGQGTKVEIK |
| VL | | |
| BCMA_EB | 1573 | MALPVTALLLPLALLLHAARPEVQLVESGGGLVQPGRSLRLSCTASGF |
| B-C1979- | | TFDDYAMHWVRQRPGKGLEWVASINWKGNSLAYGDSVKGRFAISRDNA |
| C12-aa | | KNTVFLQMNSLRTEDTAVYYCASHQGVAYYNYAMDVWGRGTLVTVSSG |
| Full CART | | GGGSGGGGSGGGGSEIVLTQSPGTLSLSPGERATLSCRATQSIGSSFL |
| | | AWYQQRPGQAPRLLIYGASQRATGIPDRFSGRGSGTDFTLTISRVEPE |
| | | DSAVYYCQHYESSPSWTFGQGTKVEIKTTTPAPRPPTPAPTIASQPLS |
| | | LRPEACRPAAGGAVHTRGLDFACDIYIWAPLAGTCGVLLLSLVITLYC |
| | | KRGRKKLLYIFKQPFMRPVQTTQEEDGCSCRFPEEEEGGCELRVKFSR |
| | | SADAPAYKQGQNQLYNELNLGRREEYDVLDKRRGRDPEMGGKPRRKNP |
| | | QEGLYNELQKDKMAEAYSEIGMKGERRRGKGHDGLYQGLSTATKDTYD |
| | | ALHMQALPPR |
| BCMA_EB | 1574 | ATGGCCCTCCCTGTCACCGCCCTGCTGCTTCCGCTGGCTCTTCTGCTC |
| B-C1979- | | CACGCCGCTCGGCCCGAAGTGCAGCTCGTGGAGAGCGGGGGAGGATTG |
| C12-nt | | GTGCAGCCCGGAAGGTCCCTGCGGCTCTCCTGCACTGCGTCTGGCTTC |
| Full CART | | ACCTTCGACGACTACGCGATGCACTGGGTCAGACAGCGCCCGGGAAAG |
| | | GGCCTGGAATGGGTCGCCTCAATCAACTGGAAGGGAAACTCCCTGGCC |
| | | TATGGCGACAGCGTGAAGGGCCGCTTCGCCATTTCGCGCGACAACGCC |
| | | AAGAACACCGTGTTTCTGCAAATGAATTCCCTGCGGACCGAGGATACC |
| | | GCTGTGTACTACTGCGCCAGCCACCAGGGCGTGGCATACTATAACTAC |
| | | GCCATGGACGTGTGGGGAAGAGGGACGCTCGTCACCGTGTCCTCCGGG |
| | | GGCGGTGGATCGGGTGGAGGAGGAAGCGGTGGCGGGGGCAGCGAAATC |
| | | GTGCTGACTCAGAGCCCGGGAACTCTTTCACTGTCCCCGGGAGAACGG |
| | | GCCACTCTCTCGTGCCGGGCCACCCAGTCCATCGGCTCCTCCTTCCTT |
| | | GCCTGGTACCAGCAGAGGCCAGGACAGGCGCCCCGCCTGCTGATCTAC |
| | | GGTGCTTCCCAACGCGCCACTGGCATTCCTGACCGGTTCAGCGGCAGA |
| | | GGGTCGGGAACCGATTTCACACTGACCATTTCCCGGGTGGAGCCCGAA |
| | | GATTCGGCAGTCTACTACTGTCAGCATTACGAGTCCTCCCCTTCATGG |
| | | ACCTTCGGTCAAGGGACCAAAGTGGAGATCAAGACCACTACCCCAGCA |
| | | CCGAGGCCACCCACCCCGGCTCCTACCATCGCCTCCCAGCCTCTGTCC |
| | | CTGCGTCCGGAGGCATGTAGACCCGCAGCTGGTGGGGCCGTGCATACC |
| | | CGGGGTCTTGACTTCGCCTGCGATATCTACATTTGGGCCCCTCTGGCT |
| | | GGTACTTGCGGGGTCCTGCTGCTTTCACTCGTGATCACTCTTTACTGT |
| | | AAGCGCGGTCGGAAGAAGCTGCTGTACATCTTTAAGCAACCCTTCATG |
| | | AGGCCTGTGCAGACTACTCAAGAGGAGGACGGCTGTTCATGCCGGTTC |
| | | CCAGAGGAGGAGGAAGGCGGCTGCGAACTGCGCGTGAAATTCAGCCGC |
| | | AGCGCAGATGCTCCAGCCTACAAGCAGGGGCAGAACCAGCTCTACAAC |
| | | GAACTCAATCTTGGTCGGAGAGAGGAGTACGACGTGCTGGACAAGCGG |
| | | AGAGGACGGGACCCAGAAATGGGCGGGAAGCCGCGCAGAAAGAATCCC |
| | | CAAGAGGGCCTGTACAACGAGCTCCAAAAGGATAAGATGGCAGAAGCC |
| | | TATAGCGAGATTGGTATGAAAGGGGAACGCAGAAGAGGCAAAGGCCAC |
| | | GACGGACTGTACCAGGGACTCAGCACCGCCACCAAGGACACCTATGAC |
| | | GCTCTTCACATGCAGGCCCTGCCGCCTCGG |

BCMA_EBB-C1980-G4

| | | |
|---|---|---|
| BCMA EB | 1575 | EVQLVESGGGLVQPGGSLRLSCAASGFTFSSYAMSWVRQAPGKGLEWV |
| B-C1980- | | SAISGSGGSTYYADSVKGRFTISRDNSKNTLYLQMNSLRAEDTAVYYC |
| G4-aa | | AKVVRDGMDVWGQGTTVTVSSGGGGSGGGGSGGGGSEIVLTQSPATLS |
| ScFv | | LSPGERATLSCRASQSVSSSYLAWYQQKPGQAPRLLIYGASSRATGIP |
| domain | | DRFSGNGSGTDFTLTISRLEPEDFAVYYCQQYGSPPRFTFGPGTKVDI |
| | | K |
| BCMA_EB | 1576 | GAGGTGCAGTTGGTCGAAAGCGGGGGCGGGCTTGTGCAGCCTGGCGGA |
| B-C1980- | | TCACTGCGGCTGTCCTGCGCGGCATCAGGCTTCACGTTTTCTTCCTAC |
| G4-nt | | GCCATGTCCTGGGTGCGCCAGGCCCCTGGAAAGGGACTGGAATGGGTG |
| ScFv | | TCCGCGATTTCGGGGTCCGGCGGGAGCACCTACTACGCCGATTCCGTG |
| domain | | AAGGGCCGCTTCACTATCTCGCGGGACAACTCCAAGAACACCCTCTAC |
| | | CTCCAAATGAATAGCCTGCGGGCCGAGGATACCGCCGTCTACTATTGC |
| | | GCTAAGGTCGTGCGCGACGGAATGGACGTGTGGGGACAGGGTACCACC |
| | | GTGACAGTGTCCTCGGGGGGAGGCGGTAGCGGCGGAGGAGGAAGCGGT |
| | | GGTGGAGGTTCCGAGATTGTGCTGACTCAATCACCCGCGACCCTGAGC |
| | | CTGTCCCCCGGCGAAAGGGCCACTCTGTCCTGTCGGGCCAGCCAATCA |
| | | GTCTCCTCCTCGTACCTGGCCTGGTACCAGCAGAAGCCAGGACAGGCT |
| | | CCGAGACTCCTTATCTATGGCGCATCCTCCCGCGCCACCGGAATCCCG |
| | | GATAGGTTCTCGGGAAACGGATCGGGGACCGACTTCACTCTCACCATC |
| | | TCCCGGCTGGAACCGGAGGACTTCGCCGTGTACTACTGCCAGCAGTAC |
| | | GGCAGCCCGCCTAGATTCACTTTCGGCCCCGGCACCAAAGTGGACATC |
| | | AAG |
| BCMA_EB | 1577 | EVQLVESGGGLVQPGGSLRLSCAASGFTFSSYAMSWVRQAPGKGLEWV |
| B-C1980- | | SAISGSGGSTYYADSVKGRFTISRDNSKNTLYLQMNSLRAEDTAVYYC |
| G4-aa | | AKVVRDGMDVWGQGTTVTVSS |
| VH | | |
| BCMA_EB | 1578 | EIVLTQSPATLSLSPGERATLSCRASQSVSSSYLAWYQQKPGQAPRLL |
| B-C1980- | | IYGASSRATGIPDRFSGNGSGTDFTLTISRLEPEDFAVYYCQQYGSPP |
| G4-aa | | RFTFGPGTKVDIK |
| VL | | |
| BCMA_EB | 1579 | MALPVTALLLPLALLLHAARPEVQLVESGGGLVQPGGSLRLSCAASGF |
| B-C1980- | | TFSSYAMSWVRQAPGKGLEWVSAISGSGGSTYYADSVKGRFTISRDNS |
| G4-aa | | KNTLYLQMNSLRAEDTAVYYCAKVVRDGMDVWGQGTTVTVSSGGGGSG |
| Full CART | | GGGSGGGGSEIVLTQSPATLSLSPGERATLSCRASQSVSSSYLAWYQQ |
| | | KPGQAPRLLIYGASSRATGIPDRFSGNGSGTDFTLTISRLEPEDFAVY |
| | | YCQQYGSPPRFTFGPGTKVDIKTTTPAPRPPTPAPTIASQPLSLRPEA |
| | | CRPAAGGAVHTRGLDFACDIYIWAPLAGTCGVLLLSLVITLYCKRGRK |
| | | KLLYIFKQPFMRPVQTTQEEDGCSCRFPEEEEGGCELRVKFSRSADAP |
| | | AYKQGQNQLYNELNLGRREEYDVLDKRRGRDPEMGGKPRRKNPQEGLY |
| | | NELQKDKMAEAYSEIGMKGERRRGKGHDGLYQGLSTATKDTYDALHMQ |
| | | ALPPR |
| BCMA_EB | 1580 | ATGGCCCTCCCTGTCACCGCCCTGCTGCTTCCGCTGGCTCTTCTGCTC |
| B-C1980- | | CACGCCGCTCGGCCCGAGGTGCAGTTGGTCGAAAGCGGGGGCGGGCTT |
| G4-nt | | GTGCAGCCTGGCGGATCACTGCGGCTGTCCTGCGCGGCATCAGGCTTC |
| Full CART | | ACGTTTTCTTCCTACGCCATGTCCTGGGTGCGCCAGGCCCCTGGAAAG |
| | | GGACTGGAATGGGTGTCCGCGATTTCGGGGTCCGGCGGGAGCACCTAC |
| | | TACGCCGATTCCGTGAAGGGCCGCTTCACTATCTCGCGGGACAACTCC |
| | | AAGAACACCCTCTACCTCCAAATGAATAGCCTGCGGGCCGAGGATACC |
| | | GCCGTCTACTATTGCGCTAAGGTCGTGCGCGACGGAATGGACGTGTGG |
| | | GGACAGGGTACCACCGTGACAGTGTCCTCGGGGGGAGGCGGTAGCGGC |
| | | GGAGGAGGAAGCGGTGGTGGAGGTTCCGAGATTGTGCTGACTCAATCA |
| | | CCCGCGACCCTGAGCCTGTCCCCCGGCGAAAGGGCCACTCTGTCCTGT |
| | | CGGGCCAGCCAATCAGTCTCCTCCTCGTACCTGGCCTGGTACCAGCAG |
| | | AAGCCAGGACAGGCTCCGAGACTCCTTATCTATGGCGCATCCTCCCGC |
| | | GCCACCGGAATCCCGGATAGGTTCTCGGGAAACGGATCGGGGACCGAC |
| | | TTCACTCTCACCATCTCCCGGCTGGAACCGGAGGACTTCGCCGTGTAC |
| | | TACTGCCAGCAGTACGGCAGCCCGCCTAGATTCACTTTCGGCCCCGGC |
| | | ACCAAAGTGGACATCAAGACCACTACCCCAGCACCGAGGCCACCCACC |
| | | CCGGCTCCTACCATCGCCTCCCAGCCTCTGTCCCTGCGTCCGGAGGCA |
| | | TGTAGACCCGCAGCTGGTGGGGCCGTGCATACCCGGGGTCTTGACTTC |
| | | GCCTGCGATATCTACATTTGGGCCCCTCTGGCTGGTACTTGCGGGGTC |
| | | CTGCTGCTTTCACTCGTGATCACTCTTTACTGTAAGCGCGGTCGGAAG |
| | | AAGCTGCTGTACATCTTTAAGCAACCCTTCATGAGGCCTGTGCAGACT |
| | | ACTCAAGAGGAGGACGGCTGTTCATGCCGGTTCCCAGAGGAGGAGGAA |
| | | GGCGGCTGCGAACTGCGCGTGAAATTCAGCCGCAGCGCAGATGCTCCA |
| | | GCCTACAAGCAGGGGCAGAACCAGCTCTACAACGAACTCAATCTTGGT |
| | | CGGAGAGAGGAGTACGACGTGCTGGACAAGCGGAGAGGACGGGACCCA |
| | | GAAATGGGCGGGAAGCCGCGCAGAAAGAATCCCCAAGAGGGCCTGTAC |
| | | AACGAGCTCCAAAAGGATAAGATGGCAGAAGCCTATAGCGAGATTGGT |
| | | ATGAAAGGGGAACGCAGAAGAGGCAAAGGCCACGACGGACTGTACCAG |
| | | GGACTCAGCACCGCCACCAAGGACACCTATGACGCTCTTCACATGCAG |
| | | GCCCTGCCGCCTCGG |

BCMA_EBB-C1980-D2

| | | |
|---|---|---|
| BCMA_EB | 1581 | EVQLLESGGGLVQPGGSLRLSCAASGFTFSSYAMSWVRQAPGKGLEWV |
| B-C1980- | | SAISGSGGSTYYADSVKGRFTISRDNSKNTLYLQMNSLRAEDTAVYYC |
| D2-aa | | AKIPQTGTFDYWGQGTLVTVSSGGGGSGGGGSGGGGSEIVLTQSPGTL |
| ScFv | | SLSPGERATLSCRASQSVSSSYLAWYQQRPGQAPRLLIYGASSRATGI |
| domain | | PDRFSGSGSGTDFTLTISRLEPEDFAVYYCQHYGSSPSWTFGQGTRLE |
| | | IK |
| BCMA_EB | 1582 | GAAGTGCAGCTGCTGGAGTCCGGCGGTGGATTGGTGCAACCGGGGGGA |
| B-C1980- | | TCGCTCAGACTGTCCTGTGCGGCGTCAGGCTTCACCTTCTCGAGCTAC |
| D2-nt | | GCCATGTCATGGGTCAGACAGGCCCCTGGAAAGGGTCTGGAATGGGTG |
| ScFv | | TCCGCCATTTCCGGGAGCGGGGGATCTACATACTACGCCGATAGCGTG |
| domain | | AAGGGCCGCTTCACCATTTCCCGGGACAACTCCAAGAACACTCTCTAT |
| | | CTGCAAATGAACTCCCTCCGCGCTGAGGACACTGCCGTGTACTACTGC |
| | | GCCAAAATCCCTCAGACCGGCACCTTCGACTACTGGGGACAGGGGACT |
| | | CTGGTCACCGTCAGCAGCGGTGGCGGAGGTTCGGGGGGAGGAGGAAGC |
| | | GGCGGCGGAGGGTCCGAGATTGTGCTGACCCAGTCACCCGGCACTTTG |
| | | TCCCTGTCGCCTGGAGAAAGGGCCACCCTTTCCTGCCGGGCATCCCAA |
| | | TCCGTGTCCTCCTCGTACCTGGCCTGGTACCAGCAGAGGCCCGGACAG |
| | | GCCCCACGGCTTCTGATCTACGGAGCAAGCAGCCGCGCGACCGGTATC |
| | | CCGGACCGGTTTTCGGGCTCGGGCTCAGGAACTGACTTCACCCTCACC |
| | | ATCTCCCGCCTGGAACCCGAAGATTTCGCTGTGTATTACTGCCAGCAC |
| | | TACGGCAGCTCCCCGTCCTGGACGTTCGGCCAGGGAACTCGGCTGGAG |
| | | ATCAAG |
| BCMA_EB | 1583 | EVQLLESGGGLVQPGGSLRLSCAASGFTFSSYAMSWVRQAPGKGLEWV |
| B-C1980- | | SAISGSGGSTYYADSVKGRFTISRDNSKNTLYLQMNSLRAEDTAVYYC |
| D2-aa | | AKIPQTGTFDYWGQGTLVTVSS |
| VH | | |
| BCMA_EB | 1584 | EIVLTQSPGTLSLSPGERATLSCRASQSVSSSYLAWYQQRPGQAPRLL |
| B-C1980- | | IYGASSRATGIPDRFSGSGSGTDFTLTISRLEPEDFAVYYCQHYGSSP |
| D2-aa | | SWTFGQGTRLEIK |
| VL | | |
| BCMA_EB | 1585 | MALPVTALLLPLALLLHAARPEVQLLESGGGLVQPGGSLRLSCAASGF |
| B-C1980- | | TESSYAMSWVRQAPGKGLEWVSAISGSGGSTYYADSVKGRETISRDNS |
| D2-aa | | KNTLYLQMNSLRAEDTAVYYCAKIPQTGTFDYWGQGTLVTVSSGGGGS |
| Full CART | | GGGGSGGGGSEIVLTQSPGTLSLSPGERATLSCRASQSVSSSYLAWYQ |
| | | QRPGQAPRLLIYGASSRATGIPDRFSGSGSGTDFTLTISRLEPEDFAV |
| | | YYCQHYGSSPSWTFGQGTRLEIKTTTPAPRPPTPAPTIASQPLSLRPE |
| | | ACRPAAGGAVHTRGLDFACDIYIWAPLAGTCGVLLLSLVITLYCKRGR |
| | | KKLLYIFKQPFMRPVQTTQEEDGCSCREPEEEEGGCELRVKFSRSADA |
| | | PAYKQGQNQLYNELNLGRREEYDVLDKRRGRDPEMGGKPRRKNPQEGL |
| | | YNELQKDKMAEAYSEIGMKGERRRGKGHDGLYQGLSTATKDTYDALHM |
| | | QALPPR |
| BCMA_EB | 1586 | ATGGCCCTCCCTGTCACCGCCCTGCTGCTTCCGCTGGCTCTTCTGCTC |
| B-C1980- | | CACGCCGCTCGGCCCGAAGTGCAGCTGCTGGAGTCCGGCGGTGGATTG |
| D2-nt | | GTGCAACCGGGGGGATCGCTCAGACTGTCCTGTGCGGCGTCAGGCTTC |
| Full CART | | ACCTTCTCGAGCTACGCCATGTCATGGGTCAGACAGGCCCCTGGAAAG |
| | | GGTCTGGAATGGGTGTCCGCCATTTCCGGGAGCGGGGGATCTACATAC |
| | | TACGCCGATAGCGTGAAGGGCCGCTTCACCATTTCCCGGGACAACTCC |
| | | AAGAACACTCTCTATCTGCAAATGAACTCCCTCCGCGCTGAGGACACT |
| | | GCCGTGTACTACTGCGCCAAAATCCCTCAGACCGGCACCTTCGACTAC |
| | | TGGGGACAGGGGACTCTGGTCACCGTCAGCAGCGGTGGCGGAGGTTCG |
| | | GGGGGAGGAGGAAGCGGCGGCGGAGGGTCCGAGATTGTGCTGACCCAG |
| | | TCACCCGGCACTTTGTCCCTGTCGCCTGGAGAAAGGGCCACCCTTTCC |
| | | TGCCGGGCATCCCAATCCGTGTCCTCCTCGTACCTGGCCTGGTACCAG |
| | | CAGAGGCCCGGACAGGCCCCACGGCTTCTGATCTACGGAGCAAGCAGC |
| | | CGCGCGACCGGTATCCCGGACCGGTTTTCGGGCTCGGGCTCAGGAACT |
| | | GACTTCACCCTCACCATCTCCCGCCTGGAACCCGAAGATTTCGCTGTG |
| | | TATTACTGCCAGCACTACGGCAGCTCCCCGTCCTGGACGTTCGGCCAG |
| | | GGAACTCGGCTGGAGATCAAGACCACTACCCCAGCACCGAGGCCACCC |
| | | ACCCCGGCTCCTACCATCGCCTCCCAGCCTCTGTCCCTGCGTCCGGAG |
| | | GCATGTAGACCCGCAGCTGGTGGGGCCGTGCATACCCGGGGTCTTGAC |
| | | TTCGCCTGCGATATCTACATTTGGGCCCCTCTGGCTGGTACTTGCGGG |
| | | GTCCTGCTGCTTTCACTCGTGATCACTCTTTACTGTAAGCGCGGTCGG |
| | | AAGAAGCTGCTGTACATCTTTAAGCAACCCTTCATGAGGCCTGTGCAG |
| | | ACTACTCAAGAGGAGGACGGCTGTTCATGCCGGTTCCCAGAGGAGGAG |
| | | GAAGGCGGCTGCGAACTGCGCGTGAAATTCAGCCGCAGCGCAGATGCT |
| | | CCAGCCTACAAGCAGGGGCAGAACCAGCTCTACAACGAACTCAATCTT |
| | | GGTCGGAGAGAGGAGTACGACGTGCTGGACAAGCGGAGAGGACGGGAC |
| | | CCAGAAATGGGCGGGAAGCCGCGCAGAAAGAATCCCCAAGAGGGCCTG |
| | | TACAACGAGCTCCAAAAGGATAAGATGGCAGAAGCCTATAGCGAGATT |
| | | GGTATGAAAGGGGAACGCAGAAGAGGCAAAGGCCACGACGGACTGTAC |
| | | CAGGGACTCAGCACCGCCACCAAGGACACCTATGACGCTCTTCACATG |
| | | CAGGCCCTGCCGCCTCGG |

BCMA_EBB-C1978-A10

| | | |
|---|---|---|
| BCMA_EB | 1587 | EVQLVETGGGLVQPGGSLRLSCAASGFTFSSYAMSWVRQAPGKGLEWV |
| B-C1978- | | SAISGSGGSTYYADSVKGRFTMSRENDKNSVFLQMNSLRVEDTGVYYC |
| A10-aa | | ARANYKRELRYYYGMDVWGQGTMVTVSSGGGGSGGGGSGGGGSEIVMT |
| ScFv | | QSPGTLSLSPGESATLSCRASQRVASNYLAWYQHKPGQAPSLLISGAS |
| domain | | SRATGVPDRFSGSGSGTDFTLAISRLEPEDSAVYYCQHYDSSPSWTFG |
| | | QGTKVEIK |
| BCMA_EB | 1588 | GAAGTGCAACTGGTGGAAACCGGTGGAGGACTCGTGCAGCCTGGCGGC |
| B-C1978- | | AGCCTCCGGCTGAGCTGCGCCGCTTCGGGATTCACCTTTTCCTCCTAC |
| A10-nt | | GCGATGTCTTGGGTCAGACAGGCCCCCGGAAAGGGGCTGGAATGGGTG |
| ScFv | | TCAGCCATCTCCGGCTCCGGCGGATCAACGTACTACGCCGACTCCGTG |
| domain | | AAAGGCCGGTTCACCATGTCGCGCGAGAATGACAAGAACTCCGTGTTC |
| | | CTGCAAATGAACTCCCTGAGGGTGGAGGACACCGGAGTGTACTATTGT |
| | | GCGCGCGCCAACTACAAGAGAGAGCTGCGGTACTACTACGGAATGGAC |
| | | GTCTGGGGACAGGGAACTATGGTGACCGTGTCATCCGGTGGAGGGGGA |
| | | AGCGGCGGTGGAGGCAGCGGGGGCGGGGGTTCAGAAATTGTCATGACC |
| | | CAGTCCCCGGGAACTCTTTCCCTCTCCCCCGGGGAATCCGCGACTTTG |
| | | TCCTGCCGGGCCAGCCAGCGCGTGGCCTCGAACTACCTCGCATGGTAC |
| | | CAGCATAAGCCAGGCCAAGCCCCTTCCCTGCTGATTTCCGGGGCTAGC |
| | | AGCCGCGCCACTGGCGTGCCGGATAGGTTCTCGGGAAGCGGCTCGGGT |
| | | ACCGATTTCACCCTGGCAATCTCGCGGCTGGAACCGGAGGATTCGGCC |
| | | GTGTACTACTGCCAGCACTATGACTCATCCCCCTCCTGGACATTCGGA |
| | | CAGGGCACCAAGGTCGAGATCAAG |
| BCMA_EB | 1589 | EVQLVETGGGLVQPGGSLRLSCAASGFTFSSYAMSWVRQAPGKGLEWV |
| B-C1978- | | SAISGSGGSTYYADSVKGRFTMSRENDKNSVFLQMNSLRVEDTGVYYC |
| A10-aa | | ARANYKRELRYYYGMDVWGQGTMVTVSS |
| VH | | |
| BCMA_EB | 1590 | EIVMTQSPGTLSLSPGESATLSCRASQRVASNYLAWYQHKPGQAPSLL |
| B-C1978- | | ISGASSRATGVPDRFSGSGSGTDFTLAISRLEPEDSAVYYCQHYDSSP |
| A10-aa | | SWTFGQGTKVEIK |
| VL | | |
| BCMA_EB | 1591 | MALPVTALLLPLALLLHAARPEVQLVETGGGLVQPGGSLRLSCAASGF |
| B-C1978- | | TFSSYAMSWVRQAPGKGLEWVSAISGSGGSTYYADSVKGRFTMSREND |
| A10-aa | | KNSVFLQMNSLRVEDTGVYYCARANYKRELRYYYGMDVWGQGTMVTVS |
| Full CART | | SGGGGSGGGGSGGGGSEIVMTQSPGTLSLSPGESATLSCRASQRVASN |
| | | YLAWYQHKPGQAPSLLISGASSRATGVPDRFSGSGSGTDFTLAISRLE |
| | | PEDSAVYYCQHYDSSPSWTFGQGTKVEIKTTTPAPRPPTPAPTIASQP |
| | | LSLRPEACRPAAGGAVHTRGLDFACDIYIWAPLAGTCGVLLLSLVITL |
| | | YCKRGRKKLLYIFKQPFMRPVQTTQEEDGCSCRFPEEEEGGCELRVKF |
| | | SRSADAPAYKQGQNQLYNELNLGRREEYDVLDKRRGRDPEMGGKPRRK |
| | | NPQEGLYNELQKDKMAEAYSEIGMKGERRRGKGHDGLYQGLSTATKDT |
| | | YDALHMQALPPR |
| BCMA_EB | 1592 | ATGGCCCTCCCTGTCACCGCCCTGCTGCTTCCGCTGGCTCTTCTGCTC |
| B-C1978- | | CACGCCGCTCGGCCCGAAGTGCAACTGGTGGAAACCGGTGGAGGACTC |
| A10-nt | | GTGCAGCCTGGCGGCAGCCTCCGGCTGAGCTGCGCCGCTTCGGGATTC |
| Full CART | | ACCTTTTCCTCCTACGCGATGTCTTGGGTCAGACAGGCCCCCGGAAAG |
| | | GGGCTGGAATGGGTGTCAGCCATCTCCGGCTCCGGCGGATCAACGTAC |
| | | TACGCCGACTCCGTGAAAGGCCGGTTCACCATGTCGCGCGAGAATGAC |
| | | AAGAACTCCGTGTTCCTGCAAATGAACTCCCTGAGGGTGGAGGACACC |
| | | GGAGTGTACTATTGTGCGCGCGCCAACTACAAGAGAGAGCTGCGGTAC |
| | | TACTACGGAATGGACGTCTGGGGACAGGGAACTATGGTGACCGTGTCA |
| | | TCCGGTGGAGGGGGAAGCGGCGGTGGAGGCAGCGGGGGCGGGGGTTCA |
| | | GAAATTGTCATGACCCAGTCCCCGGGAACTCTTTCCCTCTCCCCCGGG |
| | | GAATCCGCGACTTTGTCCTGCCGGGCCAGCCAGCGCGTGGCCTCGAAC |
| | | TACCTCGCATGGTACCAGCATAAGCCAGGCCAAGCCCCTTCCCTGCTG |
| | | ATTTCCGGGGCTAGCAGCCGCGCCACTGGCGTGCCGGATAGGTTCTCG |
| | | GGAAGCGGCTCGGGTACCGATTTCACCCTGGCAATCTCGCGGCTGGAA |
| | | CCGGAGGATTCGGCCGTGTACTACTGCCAGCACTATGACTCATCCCCC |
| | | TCCTGGACATTCGGACAGGGCACCAAGGTCGAGATCAAGACCACTACC |
| | | CCAGCACCGAGGCCACCCACCCCGGCTCCTACCATCGCCTCCCAGCCT |
| | | CTGTCCCTGCGTCCGGAGGCATGTAGACCCGCAGCTGGTGGGGCCGTG |
| | | CATACCCGGGGTCTTGACTTCGCCTGCGATATCTACATTTGGGCCCCT |
| | | CTGGCTGGTACTTGCGGGGTCCTGCTGCTTTCACTCGTGATCACTCTT |
| | | TACTGTAAGCGCGGTCGGAAGAAGCTGCTGTACATCTTTAAGCAACCC |
| | | TTCATGAGGCCTGTGCAGACTACTCAAGAGGAGGACGGCTGTTCATGC |
| | | CGGTTCCCAGAGGAGGAGGAAGGCGGCTGCGAACTGCGCGTGAAATTC |
| | | AGCCGCAGCGCAGATGCTCCAGCCTACAAGCAGGGGCAGAACCAGCTC |
| | | TACAACGAACTCAATCTTGGTCGGAGAGAGGAGTACGACGTGCTGGAC |
| | | AAGCGGAGAGGACGGGACCCAGAAATGGGCGGGAAGCCGCGCAGAAAG |
| | | AATCCCCAAGAGGGCCTGTACAACGAGCTCCAAAAGGATAAGATGGCA |
| | | GAAGCCTATAGCGAGATTGGTATGAAAGGGGAACGCAGAAGAGGCAAA |
| | | GGCCACGACGGACTGTACCAGGGACTCAGCACCGCCACCAAGGACACC |
| | | TATGACGCTCTTCACATGCAGGCCCTGCCGCCTCGG |

BCMA_EBB-C1978-D4

| | | |
|---|---|---|
| BCMA_EB | 1593 | EVQLLETGGGLVQPGGSLRLSCAASGFSFSSYAMSWVRQAPGKGLEWV |
| B-C1978- | | SAISGSGGSTYYADSVKGRFTISRDNSKNTLYLQMNSLRAEDTAVYYC |
| D4-aa | | AKALVGATGAFDIWGQGTLVTVSSGGGGSGGGGSGGGGSEIVLTQSPG |
| ScFv | | TLSLSPGERATLSCRASQSLSSNFLAWYQQKPGQAPGLLIYGASNWAT |
| domain | | GTPDRFSGSGSGTDFTLTITRLEPEDFAVYYCQYYGTSPMYTFGQGTK |
| | | VEIK |
| BCMA_EB | 1594 | GAAGTGCAGCTGCTCGAAACCGGTGGAGGGCTGGTGCAGCCAGGGGGC |
| B-C1978- | | TCCCTGAGGCTTTCATGCGCCGCTAGCGGATTCTCCTTCTCCTCTTAC |
| D4-nt | | GCCATGTCGTGGGTCCGCCAAGCCCCTGGAAAAGGCCTGGAATGGGTG |
| ScFv | | TCCGCGATTTCCGGGAGCGGAGGTTCGACCTATTACGCCGACTCCGTG |
| domain | | AAGGGCCGCTTTACCATCTCCCGGGATAACTCCAAGAACACTCTGTAC |
| | | CTCCAAATGAACTCGCTGAGAGCCGAGGACACCGCCGTGTATTACTGC |
| | | GCGAAGGCGCTGGTCGGCGCGACTGGGGCATTCGACATCTGGGGACAG |
| | | GGAACTCTTGTGACCGTGTCGAGCGGAGGCGGCGGCTCCGGCGGAGGA |
| | | GGGAGCGGGGGCGGTGGTTCCGAAATCGTGTTGACTCAGTCCCCGGGA |
| | | ACCCTGAGCTTGTCACCCGGGGAGCGGGCCACTCTCTCCTGTCGCGCC |
| | | TCCCAATCGCTCTCATCCAATTTCCTGGCCTGGTACCAGCAGAAGCCC |
| | | GGACAGGCCCCGGGCCTGCTCATCTACGGCGCTTCAAACTGGGCAACG |
| | | GGAACCCCTGATCGGTTCAGCGGAAGCGGATCGGGTACTGACTTTACC |
| | | CTGACCATCACCAGACTGGAACCGGAGGACTTCGCCGTGTACTACTGC |
| | | CAGTACTACGGCACCTCCCCCATGTACACATTCGGACAGGGTACCAAG |
| | | GTCGAGATTAAG |
| BCMA_EB | 1595 | EVQLLETGGGLVQPGGSLRLSCAASGFSFSSYAMSWVRQAPGKGLEWV |
| B-C1978- | | SAISGSGGSTYYADSVKGRFTISRDNSKNTLYLQMNSLRAEDTAVYYC |
| D4-aa | | AKALVGATGAFDIWGQGTLVTVSS |
| VH | | |
| BCMA_EB | 1596 | EIVLTQSPGTLSLSPGERATLSCRASQSLSSNFLAWYQQKPGQAPGLL |
| B-C1978- | | IYGASNWATGTPDRFSGSGSGTDFTLTITRLEPEDFAVYYCQYYGTSP |
| D4-aa | | MYTFGQGTKVEIK |
| VL | | |
| BCMA_EB | 1597 | MALPVTALLLPLALLLHAARPEVQLLETGGGLVQPGGSLRLSCAASGF |
| B-C1978- | | SFSSYAMSWVRQAPGKGLEWVSAISGSGGSTYYADSVKGRFTISRDNS |
| D4-aa | | KNTLYLQMNSLRAEDTAVYYCAKALVGATGAFDIWGQGTLVTVSSGGG |
| Full CART | | GSGGGGSGGGGSEIVLTQSPGTLSLSPGERATLSCRASQSLSSNFLAW |
| | | YQQKPGQAPGLLIYGASNWATGTPDRFSGSGSGTDFTLTITRLEPEDF |
| | | AVYYCQYYGTSPMYTFGQGTKVEIKTTTPAPRPPTPAPTIASQPLSLR |
| | | PEACRPAAGGAVHTRGLDFACDIYIWAPLAGTCGVLLLSLVITLYCKR |
| | | GRKKLLYIFKQPFMRPVQTTQEEDGCSCRFPEEEEGGCELRVKFSRSA |
| | | DAPAYKQGQNQLYNELNLGRREEYDVLDKRRGRDPEMGGKPRRKNPQE |
| | | GLYNELQKDKMAEAYSEIGMKGERRRGKGHDGLYQGLSTATKDTYDAL |
| | | HMQALPPR |
| BCMA_EB | 1598 | ATGGCCCTCCCTGTCACCGCCCTGCTGCTTCCGCTGGCTCTTCTGCTC |
| B-C1978- | | CACGCCGCTCGGCCCGAAGTGCAGCTGCTCGAAACCGGTGGAGGGCTG |
| D4-nt | | GTGCAGCCAGGGGGCTCCCTGAGGCTTTCATGCGCCGCTAGCGGATTC |
| Full CART | | TCCTTCTCCTCTTACGCCATGTCGTGGGTCCGCCAAGCCCCTGGAAAA |
| | | GGCCTGGAATGGGTGTCCGCGATTTCCGGGAGCGGAGGTTCGACCTAT |
| | | TACGCCGACTCCGTGAAGGGCCGCTTTACCATCTCCCGGGATAACTCC |
| | | AAGAACACTCTGTACCTCCAAATGAACTCGCTGAGAGCCGAGGACACC |
| | | GCCGTGTATTACTGCGCGAAGGCGCTGGTCGGCGCGACTGGGGCATTC |
| | | GACATCTGGGGACAGGGAACTCTTGTGACCGTGTCGAGCGGAGGCGGC |
| | | GGCTCCGGCGGAGGAGGGAGCGGGGGCGGTGGTTCCGAAATCGTGTTG |
| | | ACTCAGTCCCCGGGAACCCTGAGCTTGTCACCCGGGGAGCGGGCCACT |
| | | CTCTCCTGTCGCGCCTCCCAATCGCTCTCATCCAATTTCCTGGCCTGG |
| | | TACCAGCAGAAGCCCGGACAGGCCCCGGGCCTGCTCATCTACGGCGCT |
| | | TCAAACTGGGCAACGGGAACCCCTGATCGGTTCAGCGGAAGCGGATCG |
| | | GGTACTGACTTTACCCTGACCATCACCAGACTGGAACCGGAGGACTTC |
| | | GCCGTGTACTACTGCCAGTACTACGGCACCTCCCCCATGTACACATTC |
| | | GGACAGGGTACCAAGGTCGAGATTAAGACCACTACCCCAGCACCGAGG |
| | | CCACCCACCCCGGCTCCTACCATCGCCTCCCAGCCTCTGTCCCTGCGT |
| | | CCGGAGGCATGTAGACCCGCAGCTGGTGGGGCCGTGCATACCCGGGGT |
| | | CTTGACTTCGCCTGCGATATCTACATTTGGGCCCCTCTGGCTGGTACT |
| | | TGCGGGGTCCTGCTGCTTTCACTCGTGATCACTCTTTACTGTAAGCGC |
| | | GGTCGGAAGAAGCTGCTGTACATCTTTAAGCAACCCTTCATGAGGCCT |
| | | GTGCAGACTACTCAAGAGGAGGACGGCTGTTCATGCCGGTTCCCAGAG |
| | | GAGGAGGAAGGCGGCTGCGAACTGCGCGTGAAATTCAGCCGCAGCGCA |
| | | GATGCTCCAGCCTACAAGCAGGGGCAGAACCAGCTCTACAACGAACTC |
| | | AATCTTGGTCGGAGAGAGGAGTACGACGTGCTGGACAAGCGGAGAGGA |
| | | CGGGACCCAGAAATGGGCGGGAAGCCGCGCAGAAAGAATCCCCAAGAG |
| | | GGCCTGTACAACGAGCTCCAAAAGGATAAGATGGCAGAAGCCTATAGC |
| | | GAGATTGGTATGAAAGGGGAACGCAGAAGAGGCAAAGGCCACGACGGA |
| | | CTGTACCAGGGACTCAGCACCGCCACCAAGGACACCTATGACGCTCTT |
| | | CACATGCAGGCCCTGCCGCCTCGG |

BCMA_EBB-C1980-A2

| | | |
|---|---|---|
| BCMA_EB | 1599 | EVQLLESGGGLVQPGGSLRLSCAASGFTFSSYAMSWVRQAPGKGLEWV |
| B-C1980- | | SAISGSGGSTYYADSVKGRFTISRDNSKNTLYLQMNSLRAEDTAVYYC |
| A2-aa | | VLWFGEGFDPWGQGTLVTVSSGGGGSGGGGSGGGGSDIVLTQSPLSLP |
| ScFv | | VTPGEPASISCRSSQSLLHSNGYNYLDWYLQKPGQSPQLLIYLGSNRA |
| domain | | SGVPDRFSGSGSGTDFTLKISRVEAEDVGVYYCMQALQTPLTFGGGTK |
| | | VDIK |
| BCMA_EB | 1600 | GAAGTGCAGCTGCTTGAGAGCGGTGGAGGTCTGGTGCAGCCCGGGGGA |
| B-C1980- | | TCACTGCGCCTGTCCTGTGCCGCGTCCGGTTTCACTTTCTCCTCGTAC |
| A2-nt | | GCCATGTCGTGGGTCAGACAGGCACCGGGAAAGGGACTGGAATGGGTG |
| ScFv | | TCAGCCATTTCGGGTTCGGGGGGCAGCACCTACTACGCTGACTCCGTG |
| domain | | AAGGGCCGGTTCACCATTTCCCGCGACAACTCCAAGAACACCTTGTAC |
| | | CTCCAAATGAACTCCCTGCGGGCCGAAGATACCGCCGTGTATTACTGC |
| | | GTGCTGTGGTTCGGAGAGGGATTCGACCCGTGGGGACAAGGAACACTC |
| | | GTGACTGTGTCATCCGGCGGAGGCGGCAGCGGTGGCGGCGGTTCCGGC |
| | | GGCGGCGGATCTGACATCGTGTTGACCCAGTCCCCTCTGAGCCTGCCG |
| | | GTCACTCCTGGCGAACCAGCCAGCATCTCCTGCCGGTCGAGCCAGTCC |
| | | CTCCTGCACTCCAATGGGTACAACTACCTCGATTGGTATCTGCAAAAG |
| | | CCGGGCCAGAGCCCCCAGCTGCTGATCTACCTTGGGTCAAACCGCGCT |
| | | TCCGGGGTGCCTGATAGATTCTCCGGGTCCGGGAGCGGAACCGACTTT |
| | | ACCCTGAAAATCTCGAGGGTGGAGGCCGAGGACGTCGGAGTGTACTAC |
| | | TGCATGCAGGCGCTCCAGACTCCCCTGACCTTCGGAGGAGGAACGAAG |
| | | GTCGACATCAAGA |
| BCMA_EB | 1601 | EVQLLESGGGLVQPGGSLRLSCAASGFTFSSYAMSWVRQAPGKGLEWV |
| B-C1980- | | SAISGSGGSTYYADSVKGRFTISRDNSKNTLYLQMNSLRAEDTAVYYC |
| A2-aa | | VLWFGEGFDPWGQGTLVTVSS |
| VH | | |
| BCMA_EB | 1602 | DIVLTQSPLSLPVTPGEPASISCRSSQSLLHSNGYNYLDWYLQKPGQS |
| B-C1980- | | PQLLIYLGSNRASGVPDRFSGSGSGTDFTLKISRVEAEDVGVYYCMQA |
| A2-aa | | LQTPLTFGGGTKVDIK |
| VL | | |
| BCMA_EB | 1603 | MALPVTALLLPLALLLHAARPEVQLLESGGGLVQPGGSLRLSCAASGF |
| B-C1980- | | TFSSYAMSWVRQAPGKGLEWVSAISGSGGSTYYADSVKGRFTISRDNS |
| A2-aa | | KNTLYLQMNSLRAEDTAVYYCVLWFGEGFDPWGQGTLVTVSSGGGGSG |
| Full CART | | GGGSGGGGSDIVLTQSPLSLPVTPGEPASISCRSSQSLLHSNGYNYLD |
| | | WYLQKPGQSPQLLIYLGSNRASGVPDRFSGSGSGTDFTLKISRVEAED |
| | | VGVYYCMQALQTPLTFGGGTKVDIKTTTPAPRPPTPAPTIASQPLSLR |
| | | PEACRPAAGGAVHTRGLDFACDIYIWAPLAGTCGVLLLSLVITLYCKR |
| | | GRKKLLYIFKQPFMRPVQTTQEEDGCSCRFPEEEEGGCELRVKFSRSA |
| | | DAPAYKQGQNQLYNELNLGRREEYDVLDKRRGRDPEMGGKPRRKNPQE |
| | | GLYNELQKDKMAEAYSEIGMKGERRRGKGHDGLYQGLSTATKDTYDAL |
| | | HMQALPPR |
| BCMA_EB | 1604 | ATGGCCCTCCCTGTCACCGCCCTGCTGCTTCCGCTGGCTCTTCTGCTC |
| B-C1980- | | CACGCCGCTCGGCCCGAAGTGCAGCTGCTTGAGAGCGGTGGAGGTCTG |
| A2-nt | | GTGCAGCCCGGGGGATCACTGCGCCTGTCCTGTGCCGCGTCCGGTTTC |
| Full CART | | ACTTTCTCCTCGTACGCCATGTCGTGGGTCAGACAGGCACCGGGAAAG |
| | | GGACTGGAATGGGTGTCAGCCATTTCGGGTTCGGGGGGCAGCACCTAC |
| | | TACGCTGACTCCGTGAAGGGCCGGTTCACCATTTCCCGCGACAACTCC |
| | | AAGAACACCTTGTACCTCCAAATGAACTCCCTGCGGGCCGAAGATACC |
| | | GCCGTGTATTACTGCGTGCTGTGGTTCGGAGAGGGATTCGACCCGTGG |
| | | GGACAAGGAACACTCGTGACTGTGTCATCCGGCGGAGGCGGCAGCGGT |
| | | GGCGGCGGTTCCGGCGGCGGCGGATCTGACATCGTGTTGACCCAGTCC |
| | | CCTCTGAGCCTGCCGGTCACTCCTGGCGAACCAGCCAGCATCTCCTGC |
| | | CGGTCGAGCCAGTCCCTCCTGCACTCCAATGGGTACAACTACCTCGAT |
| | | TGGTATCTGCAAAAGCCGGGCCAGAGCCCCCAGCTGCTGATCTACCTT |
| | | GGGTCAAACCGCGCTTCCGGGGTGCCTGATAGATTCTCCGGGTCCGGG |
| | | AGCGGAACCGACTTTACCCTGAAAATCTCGAGGGTGGAGGCCGAGGAC |
| | | GTCGGAGTGTACTACTGCATGCAGGCGCTCCAGACTCCCCTGACCTTC |
| | | GGAGGAGGAACGAAGGTCGACATCAAGACCACTACCCCAGCACCGAGG |
| | | CCACCCACCCCGGCTCCTACCATCGCCTCCCAGCCTCTGTCCCTGCGT |
| | | CCGGAGGCATGTAGACCCGCAGCTGGTGGGGCCGTGCATACCCGGGGT |
| | | CTTGACTTCGCCTGCGATATCTACATTTGGGCCCCTCTGGCTGGTACT |
| | | TGCGGGGTCCTGCTGCTTTCACTCGTGATCACTCTTTACTGTAAGCGC |
| | | GGTCGGAAGAAGCTGCTGTACATCTTTAAGCAACCCTTCATGAGGCCT |
| | | GTGCAGACTACTCAAGAGGAGGACGGCTGTTCATGCCGGTTCCCAGAG |
| | | GAGGAGGAAGGCGGCTGCGAACTGCGCGTGAAATTCAGCCGCAGCGCA |
| | | GATGCTCCAGCCTACAAGCAGGGGCAGAACCAGCTCTACAACGAACTC |
| | | AATCTTGGTCGGAGAGAGGAGTACGACGTGCTGGACAAGCGGAGAGGA |
| | | CGGGACCCAGAAATGGGCGGGAAGCCGCGCAGAAAGAATCCCCAAGAG |
| | | GGCCTGTACAACGAGCTCCAAAAGGATAAGATGGCAGAAGCCTATAGC |
| | | GAGATTGGTATGAAAGGGGAACGCAGAAGAGGCAAAGGCCACGACGGA |
| | | CTGTACCAGGGACTCAGCACCGCCACCAAGGACACCTATGACGCTCTT |
| | | CACATGCAGGCCCTGCCGCCTCGG |

BCMA_EBB-C1981-C3

| | | |
|---|---|---|
| BCMA_EB | 1605 | QVQLVESGGGLVQPGGSLRLSCAASGFTFSSYAMSWVRQAPGKGLEWV |
| B-C1981- | | SAISGSGGSTYYADSVKGRFTISRDNSKNTLYLQMNSLRAEDTAVYYC |
| C3-aa | | AKVGYDSSGYYRDYYGMDVWGQGTTVTVSSGGGGSGGGGSGGGGSEIV |
| ScFv | | LTQSPGTLSLSPGERATLSCRASQSVSSSYLAWYQQKPGQAPRLLIYG |
| domain | | TSSRATGISDRFSGSGSGTDFTLTISRLEPEDFAVYYCQHYGNSPPKF |
| | | TFGPGTKLEIK |
| BCMA_EB | 1606 | CAAGTGCAGCTCGTGGAGTCAGGCGGAGGACTGGTGCAGCCCGGGGGC |
| B-C1981- | | TCCCTGAGACTTTCCTGCGCGGCATCGGGTTTTACCTTCTCCTCCTAT |
| C3-nt | | GCTATGTCCTGGGTGCGCCAGGCCCCGGGAAAGGGACTGGAATGGGTG |
| ScFv | | TCCGCAATCAGCGGTAGCGGGGGCTCAACATACTACGCCGACTCCGTC |
| domain | | AAGGGTCGCTTCACTATTTCCCGGGACAACTCCAAGAATACCCTGTAC |
| | | CTCCAAATGAACAGCCTCAGGGCCGAGGATACTGCCGTGTACTACTGC |
| | | GCCAAAGTCGGATACGATAGCTCCGGTTACTACCGGGACTACTACGGA |
| | | ATGGACGTGTGGGGACAGGGCACCACCGTGACCGTGTCAAGCGGCGGA |
| | | GGCGGTTCAGGAGGGGGAGGCTCCGGCGGTGGAGGGTCCGAAATCGTC |
| | | CTGACTCAGTCGCCTGGCACTCTGTCGTTGTCCCCGGGGGAGCGCGCT |
| | | ACCCTGTCGTGTCGGGCGTCGCAGTCCGTGTCGAGCTCCTACCTCGCG |
| | | TGGTACCAGCAGAAGCCCGGACAGGCCCCTAGACTTCTGATCTACGGC |
| | | ACTTCTTCACGCGCCACCGGGATCAGCGACAGGTTCAGCGGCTCCGGC |
| | | TCCGGGACCGACTTCACCCTGACCATTAGCCGGCTGGAGCCTGAAGAT |
| | | TTCGCCGTGTATTACTGCCAACACTACGGAAACTCGCCGCCAAAGTTC |
| | | ACGTTCGGACCCGGAACCAAGCTGGAAATCAAG |
| BCMA_EB | 1607 | QVQLVESGGGLVQPGGSLRLSCAASGFTFSSYAMSWVRQAPGKGLEWV |
| B-C1981- | | SAISGSGGSTYYADSVKGRFTISRDNSKNTLYLQMNSLRAEDTAVYYC |
| C3-aa | | AKVGYDSSGYYRDYYGMDVWGQGTTVTVSS |
| VH | | |
| BCMA_EB | 1608 | EIVLTQSPGTLSLSPGERATLSCRASQSVSSSYLAWYQQKPGQAPRLL |
| B-C1981- | | IYGTSSRATGISDRFSGSGSGTDFTLTISRLEPEDFAVYYCQHYGNSP |
| C3-aa | | PKFTFGPGTKLEIK |
| VL | | |
| BCMA_EB | 1609 | MALPVTALLLPLALLLHAARPQVQLVESGGGLVQPGGSLRLSCAASGF |
| B-C1981- | | TFSSYAMSWVRQAPGKGLEWVSAISGSGGSTYYADSVKGRFTISRDNS |
| C3-aa | | KNTLYLQMNSLRAEDTAVYYCAKVGYDSSGYYRDYYGMDVWGQGTTVT |
| Full CART | | VSSGGGGSGGGGSGGGGSEIVLTQSPGTLSLSPGERATLSCRASQSVS |
| | | SSYLAWYQQKPGQAPRLLIYGTSSRATGISDRFSGSGSGTDFTLTISR |
| | | LEPEDFAVYYCQHYGNSPPKFTFGPGTKLEIKTTTPAPRPPTPAPTIA |
| | | SQPLSLRPEACRPAAGGAVHTRGLDFACDIYIWAPLAGTCGVLLLSLV |
| | | ITLYCKRGRKKLLYIFKQPFMRPVQTTQEEDGCSCRFPEEEEGGCELR |
| | | VKFSRSADAPAYKQGQNQLYNELNLGRREEYDVLDKRRGRDPEMGGKP |
| | | RRKNPQEGLYNELQKDKMAEAYSEIGMKGERRRGKGHDGLYQGLSTAT |
| | | KDTYDALHMQALPPR |
| BCMA_EB | 1610 | ATGGCCCTCCCTGTCACCGCCCTGCTGCTTCCGCTGGCTCTTCTGCTC |
| B-C1981- | | CACGCCGCTCGGCCCCAAGTGCAGCTCGTGGAGTCAGGCGGAGGACTG |
| C3-nt | | GTGCAGCCCGGGGGCTCCCTGAGACTTTCCTGCGCGGCATCGGGTTTT |
| Full CART | | ACCTTCTCCTCCTATGCTATGTCCTGGGTGCGCCAGGCCCCGGGAAAG |
| | | GGACTGGAATGGGTGTCCGCAATCAGCGGTAGCGGGGGCTCAACATAC |
| | | TACGCCGACTCCGTCAAGGGTCGCTTCACTATTTCCCGGGACAACTCC |
| | | AAGAATACCCTGTACCTCCAAATGAACAGCCTCAGGGCCGAGGATACT |
| | | GCCGTGTACTACTGCGCCAAAGTCGGATACGATAGCTCCGGTTACTAC |
| | | CGGGACTACTACGGAATGGACGTGTGGGGACAGGGCACCACCGTGACC |
| | | GTGTCAAGCGGCGGAGGCGGTTCAGGAGGGGGAGGCTCCGGCGGTGGA |
| | | GGGTCCGAAATCGTCCTGACTCAGTCGCCTGGCACTCTGTCGTTGTCC |
| | | CCGGGGGAGCGCGCTACCCTGTCGTGTCGGGCGTCGCAGTCCGTGTCG |
| | | AGCTCCTACCTCGCGTGGTACCAGCAGAAGCCCGGACAGGCCCCTAGA |
| | | CTTCTGATCTACGGCACTTCTTCACGCGCCACCGGGATCAGCGACAGG |
| | | TTCAGCGGCTCCGGCTCCGGGACCGACTTCACCCTGACCATTAGCCGG |
| | | CTGGAGCCTGAAGATTTCGCCGTGTATTACTGCCAACACTACGGAAAC |
| | | TCGCCGCCAAAGTTCACGTTCGGACCCGGAACCAAGCTGGAAATCAAG |
| | | ACCACTACCCCAGCACCGAGGCCACCCACCCCGGCTCCTACCATCGCC |
| | | TCCCAGCCTCTGTCCCTGCGTCCGGAGGCATGTAGACCCGCAGCTGGT |
| | | GGGGCCGTGCATACCCGGGGTCTTGACTTCGCCTGCGATATCTACATT |
| | | TGGGCCCCTCTGGCTGGTACTTGCGGGGTCCTGCTGCTTTCACTCGTG |
| | | ATCACTCTTTACTGTAAGCGCGGTCGGAAGAAGCTGCTGTACATCTTT |
| | | AAGCAACCCTTCATGAGGCCTGTGCAGACTACTCAAGAGGAGGACGGC |
| | | TGTTCATGCCGGTTCCCAGAGGAGGAGGAAGGCGGCTGCGAACTGCGC |
| | | GTGAAATTCAGCCGCAGCGCAGATGCTCCAGCCTACAAGCAGGGGCAG |
| | | AACCAGCTCTACAACGAACTCAATCTTGGTCGGAGAGAGGAGTACGAC |
| | | GTGCTGGACAAGCGGAGAGGACGGGACCCAGAAATGGGCGGGAAGCCG |
| | | CGCAGAAAGAATCCCCAAGAGGGCCTGTACAACGAGCTCCAAAAGGAT |
| | | AAGATGGCAGAAGCCTATAGCGAGATTGGTATGAAAGGGGAACGCAGA |
| | | AGAGGCAAAGGCCACGACGGACTGTACCAGGGACTCAGCACCGCCACC |
| | | AAGGACACCTATGACGCTCTTCACATGCAGGCCCTGCCGCCTCGG |

BCMA_EBB-C1978-G4

| | | |
|---|---|---|
| BCMA_EB | 1611 | EVQLVESGGGLVQPGGSLRLSCAASGFTFSSYAMSWVRQAPGKGLEWV |
| B-C1978- | | SAISGSGGSTYYADSVKGRFTISRDNSKNTLYLQMNSLRAEDTAVYYC |
| G4-aa | | AKMGWSSGYLGAFDIWGQGTTVTVSSGGGGSGGGGSGGGGSEIVLTQS |
| ScFv | | PGTLSLSPGERATLSCRASQSVASSFLAWYQQKPGQAPRLLIYGASGR |
| domain | | ATGIPDRFSGSGSGTDFTLTISRLEPEDFAVYYCQHYGGSPRLTFGGG |
| | | TKVDIK |
| BCMA_EB | 1612 | GAAGTCCAACTGGTGGAGTCCGGGGGAGGGCTCGTGCAGCCCGGAGGC |
| B-C1978- | | AGCCTTCGGCTGTCGTGCGCCGCCTCCGGGTTCACGTTCTCATCCTAC |
| G4-nt | | GCGATGTCGTGGGTCAGACAGGCACCAGGAAAGGGACTGGAATGGGTG |
| ScFv | | TCCGCCATTAGCGGCTCCGGCGGTAGCACCTACTATGCCGACTCAGTG |
| domain | | AAGGGAAGGTTCACTATCTCCCGCGACAACAGCAAGAACACCCTGTAC |
| | | CTCCAAATGAACTCTCTGCGGGCCGAGGATACCGCGGTGTACTATTGC |
| | | GCCAAGATGGGTTGGTCCAGCGGATACTTGGGAGCCTTCGACATTTGG |
| | | GGACAGGGCACTACTGTGACCGTGTCCTCCGGGGGTGGCGGATCGGGA |
| | | GGCGGCGGCTCGGGTGGAGGGGGTTCCGAAATCGTGTTGACCCAGTCA |
| | | CCGGGAACCCTCTCGCTGTCCCCGGGAGAACGGGCTACACTGTCATGT |
| | | AGAGCGTCCCAGTCCGTGGCTTCCTCGTTCCTGGCCTGGTACCAGCAG |
| | | AAGCCGGGACAGGCACCCCGCCTGCTCATCTACGGAGCCAGCGGCCGG |
| | | GCGACCGGCATCCCTGACCGCTTCTCCGGTTCCGGCTCGGGCACCGAC |
| | | TTTACTCTGACCATTAGCAGGCTTGAGCCCGAGGATTTTGCCGTGTAC |
| | | TACTGCCAACACTACGGGGGGAGCCCTCGCCTGACCTTCGGAGGCGGA |
| | | ACTAAGGTCGATATCAAAA |
| BCMA_EB | 1613 | EVQLVESGGGLVQPGGSLRLSCAASGFTFSSYAMSWVRQAPGKGLEWV |
| B-C1978- | | SAISGSGGSTYYADSVKGRFTISRDNSKNTLYLQMNSLRAEDTAVYYC |
| G4-aa | | AKMGWSSGYLGAFDIWGQGTTVTVSS |
| VH | | |
| BCMA_EB | 1614 | EIVLTQSPGTLSLSPGERATLSCRASQSVASSFLAWYQQKPGQAPRLL |
| B-C1978- | | IYGASGRATGIPDRFSGSGSGTDFTLTISRLEPEDFAVYYCQHYGGSP |
| G4-aa | | RLTFGGGTKVDIK |
| VL | | |
| BCMA_EB | 1615 | MALPVTALLLPLALLLHAARPEVQLVESGGGLVQPGGSLRLSCAASGF |
| B-C1978- | | TFSSYAMSWVRQAPGKGLEWVSAISGSGGSTYYADSVKGRFTISRDNS |
| G4-aa | | KNTLYLQMNSLRAEDTAVYYCAKMGWSSGYLGAFDIWGQGTTVTVSSG |
| Full CART | | GGGSGGGGSGGGGSEIVLTQSPGTLSLSPGERATLSCRASQSVASSFL |
| | | AWYQQKPGQAPRLLIYGASGRATGIPDRFSGSGSGTDFTLTISRLEPE |
| | | DFAVYYCQHYGGSPRLTFGGGTKVDIKTTTPAPRPPTPAPTIASQPLS |
| | | LRPEACRPAAGGAVHTRGLDFACDIYIWAPLAGTCGVLLLSLVITLYC |
| | | KRGRKKLLYIFKQPFMRPVQTTQEEDGCSCRFPEEEEGGCELRVKFSR |
| | | SADAPAYKQGQNQLYNELNLGRREEYDVLDKRRGRDPEMGGKPRRKNP |
| | | QEGLYNELQKDKMAEAYSEIGMKGERRRGKGHDGLYQGLSTATKDTYD |
| | | ALHMQALPPR |
| BCMA_EB | 1616 | ATGGCCCTCCCTGTCACCGCCCTGCTGCTTCCGCTGGCTCTTCTGCTC |
| B-C1978- | | CACGCCGCTCGGCCCGAAGTCCAACTGGTGGAGTCCGGGGGAGGGCTC |
| G4-nt | | GTGCAGCCCGGAGGCAGCCTTCGGCTGTCGTGCGCCGCCTCCGGGTTC |
| Full CART | | ACGTTCTCATCCTACGCGATGTCGTGGGTCAGACAGGCACCAGGAAAG |
| | | GGACTGGAATGGGTGTCCGCCATTAGCGGCTCCGGCGGTAGCACCTAC |
| | | TATGCCGACTCAGTGAAGGGAAGGTTCACTATCTCCCGCGACAACAGC |
| | | AAGAACACCCTGTACCTCCAAATGAACTCTCTGCGGGCCGAGGATACC |
| | | GCGGTGTACTATTGCGCCAAGATGGGTTGGTCCAGCGGATACTTGGGA |
| | | GCCTTCGACATTTGGGGACAGGGCACTACTGTGACCGTGTCCTCCGGG |
| | | GGTGGCGGATCGGGAGGCGGCGGCTCGGGTGGAGGGGGTTCCGAAATC |
| | | GTGTTGACCCAGTCACCGGGAACCCTCTCGCTGTCCCCGGGAGAACGG |
| | | GCTACACTGTCATGTAGAGCGTCCCAGTCCGTGGCTTCCTCGTTCCTG |
| | | GCCTGGTACCAGCAGAAGCCGGGACAGGCACCCCGCCTGCTCATCTAC |
| | | GGAGCCAGCGGCCGGGCGACCGGCATCCCTGACCGCTTCTCCGGTTCC |
| | | GGCTCGGGCACCGACTTTACTCTGACCATTAGCAGGCTTGAGCCCGAG |
| | | GATTTTGCCGTGTACTACTGCCAACACTACGGGGGGAGCCCTCGCCTG |
| | | ACCTTCGGAGGCGGAACTAAGGTCGATATCAAAACCACTACCCCAGCA |
| | | CCGAGGCCACCCACCCCGGCTCCTACCATCGCCTCCCAGCCTCTGTCC |
| | | CTGCGTCCGGAGGCATGTAGACCCGCAGCTGGTGGGGCCGTGCATACC |
| | | CGGGGTCTTGACTTCGCCTGCGATATCTACATTTGGGCCCCTCTGGCT |
| | | GGTACTTGCGGGGTCCTGCTGCTTTCACTCGTGATCACTCTTTACTGT |
| | | AAGCGCGGTCGGAAGAAGCTGCTGTACATCTTTAAGCAACCCTTCATG |
| | | AGGCCTGTGCAGACTACTCAAGAGGAGGACGGCTGTTCATGCCGGTTC |
| | | CCAGAGGAGGAGGAAGGCGGCTGCGAACTGCGCGTGAAATTCAGCCGC |
| | | AGCGCAGATGCTCCAGCCTACAAGCAGGGGCAGAACCAGCTCTACAAC |
| | | GAACTCAATCTTGGTCGGAGAGAGGAGTACGACGTGCTGGACAAGCGG |
| | | AGAGGACGGGACCCAGAAATGGGCGGGAAGCCGCGCAGAAAGAATCCC |
| | | CAAGAGGGCCTGTACAACGAGCTCCAAAAGGATAAGATGGCAGAAGCC |
| | | TATAGCGAGATTGGTATGAAAGGGGAACGCAGAAGAGGCAAAGGCCAC |
| | | GACGGACTGTACCAGGGACTCAGCACCGCCACCAAGGACACCTATGAC |
| | | GCTCTTCACATGCAGGCCCTGCCGCCTCGG |

TABLE 4E
Additional exemplary BCMA CAR sequences

| | | SEQ ID |
|---|---|---|
| Name | Sequence | NO: |
| A7D12.2 | QIQLVQSGPDLKKPGETVKLSCKASGYTFTNFGMNWVKQAPGKGFKWMAWINTYTGES | 1617 |
| VH | YFADDFKGRFAFSVETSATTAYLQINNLKTEDTATYFCARGEIYYGYDGGFAYWGQGT | |
| | LVTVSA | |
| A7D12.2 | DVVMTQSHRFMSTSVGDRVSITCRASQDVNTAVSWYQQKPGQSPKLLIFSASYRYTGV | 1618 |
| VL | PDRFTGSGSGADFTLTISSVQAEDLAVYYCQQHYSTPWTFGGGTKLDIK | |
| A7D12.2 | QIQLVQSGPDLKKPGETVKLSCKASGYTFTNFGMNWVKQAPGKGFKWMAWINTYTGES | 1619 |
| scFv | YFADDFKGRFAFSVETSATTAYLQINNLKTEDTATYFCARGEIYYGYDGGFAYWGQGT | |
| domain | LVTVSAGGGGSGGGGSGGGGSDVVMTQSHRFMSTSVGDRVSITCRASQDVNTAVSWYQ | |
| | QKPGQSPKLLIFSASYRYTGVPDRFTGSGSGADFTLTISSVQAEDLAVYYCQQHYSTP | |
| | WTFGGGTKLDIK | |
| A7D12.2 | QIQLVQSGPDLKKPGETVKLSCKASGYTFTNFGMNWVKQAPGKGFKWMAWINTYTGES | 1620 |
| Full | YFADDFKGRFAFSVETSATTAYLQINNLKTEDTATYFCARGEIYYGYDGGFAYWGQGT | |
| CART | LVTVSAGGGGSGGGGSGGGGSDVVMTQSHRFMSTSVGDRVSITCRASQDVNTAVSWYQ | |
| | QKPGQSPKLLIFSASYRYTGVPDRFTGSGSGADFTLTISSVQAEDLAVYYCQQHYSTP | |
| | WTFGGGTKLDIKTTTPAPRPPTPAPTIASQPLSLRPEACRPAAGGAVHTRGLDFACDI | |
| | YIWAPLAGTCGVLLLSLVITLYCKRGRKKLLYIFKQPFMRPVQTTQEEDGCSCRFPEE | |
| | EEGGCELRVKFSRSADAPAYKQGQNQLYNELNLGRREEYDVLDKRRGRDPEMGGKPRR | |
| | KNPQEGLYNELQKDKMAEAYSEIGMKGERRRGKGHDGLYQGLSTATKDTYDALHMQAL | |
| | PPR | |
| C11D5.3 | QIQLVQSGPELKKPGETVKISCKASGYTFTDYSINWVKRAPGKGLKWMGWINTETREP | 1621 |
| VH | AYAYDFRGRFAFSLETSASTAYLQINNLKYEDTATYFCALDYSYAMDYWGQGTSVTVS | |
| | S | |
| C11D5.3 | DIVLTQSPASLAMSLGKRATISCRASESVSVIGAHLIHWYQQKPGQPPKLLIYLASNL | 1622 |
| VL | ETGVPARFSGSGSGTDFTLTIDPVEEDDVAIYSCLQSRIFPRTFGGGTKLEIK | |
| C11D5.3 | QIQLVQSGPELKKPGETVKISCKASGYTFTDYSINWVKRAPGKGLKWMGWINTETREP | 1623 |
| scFv | AYAYDFRGRFAFSLETSASTAYLQINNLKYEDTATYFCALDYSYAMDYWGQGTSVTVS | |
| domain | SGGGGSGGGGSGGGGSQIQLVQSGPELKKPGETVKISCKASGYTFTDYSINWVKRAPG | |
| | KGLKWMGWINTETREPAYAYDFRGRFAFSLETSASTAYLQINNLKYEDTATYFCALDY | |
| | SYAMDYWGQGTSVTVSS | |
| C11D5.3 | QIQLVQSGPELKKPGETVKISCKASGYTFTDYSINWVKRAPGKGLKWMGWINTETREP | 1624 |
| Full | AYAYDFRGRFAFSLETSASTAYLQINNLKYEDTATYFCALDYSYAMDYWGQGTSVTVS | |
| CART | SGGGGSGGGGSGGGGSQIQLVQSGPELKKPGETVKISCKASGYTFTDYSINWVKRAPG | |
| | KGLKWMGWINTETREPAYAYDFRGRFAFSLETSASTAYLQINNLKYEDTATYFCALDY | |
| | SYAMDYWGQGTSVTVSSTTTPAPRPPTPAPTIASQPLSLRPEACRPAAGGAVHTRGLD | |
| | FACDIYIWAPLAGTCGVLLLSLVITLYCKRGRKKLLYIFKQPFMRPVQTTQEEDGCSC | |
| | RFPEEEEGGCELRVKFSRSADAPAYKQGQNQLYNELNLGRREEYDVLDKRRGRDPEMG | |
| | GKPRRKNPQEGLYNELQKDKMAEAYSEIGMKGERRRGKGHDGLYQGLSTATKDTYDAL | |
| | HMQALPPR | |
| C12A3.2 | QIQLVQSGPELKKPGETVKISCKASGYTFRHYSMNWVKQAPGKGLKWMGRINTESGVP | 1625 |
| VH | IYADDFKGRFAFSVETSASTAYLVINNLKDEDTASYFCSNDYLYSLDFWGQGTALTVS | |
| | S | |
| C12A3.2 | DIVLTQSPPSLAMSLGKRATISCRASESVTILGSHLIYWYQQKPGQPPTLLIQLASNV | 1626 |
| VL | QTGVPARFSGSGSRTDFTLTIDPVEEDDVAVYYCLQSRTIPRTFGGGTKLEIK | |
| C12A3.2 | QIQLVQSGPELKKPGETVKISCKASGYTFRHYSMNWVKQAPGKGLKWMGRINTESGVP | 1627 |
| scFv | IYADDFKGRFAFSVETSASTAYLVINNLKDEDTASYFCSNDYLYSLDFWGQGTALTVS | |
| domain | SGGGGSGGGGSGGGGSDIVLTQSPPSLAMSLGKRATISCRASESVTILGSHLIYWYQQ | |
| | KPGQPPTLLIQLASNVQTGVPARFSGSGSRTDFTLTIDPVEEDDVAVYYCLQSRTIPR | |
| | TFGGGTKLEIK | |
| C12A3.2 | QIQLVQSGPELKKPGETVKISCKASGYTFRHYSMNWVKQAPGKGLKWMGRINTESGVP | 1628 |
| Full | IYADDFKGRFAFSVETSASTAYLVINNLKDEDTASYFCSNDYLYSLDFWGQGTALTVS | |
| CART | SGGGGSGGGGSGGGGSDIVLTQSPPSLAMSLGKRATISCRASESVTILGSHLIYWYQQ | |
| | KPGQPPTLLIQLASNVQTGVPARFSGSGSRTDFTLTIDPVEEDDVAVYYCLQSRTIPR | |
| | TFGGGTKLEIKTTTPAPRPPTPAPTIASQPLSLRPEACRPAAGGAVHTRGLDFACDIY | |
| | IWAPLAGTCGVLLLSLVITLYCKRGRKKLLYIFKQPFMRPVQTTQEEDGCSCRFPEEE | |
| | EGGCELRVKFSRSADAPAYKQGQNQLYNELNLGRREEYDVLDKRRGRDPEMGGKPRRK | |
| | NPQEGLYNELQKDKMAEAYSEIGMKGERRRGKGHDGLYQGLSTATKDTYDALHMQALP | |
| | PR | |
| C13F12.1 | QIQLVQSGPELKKPGETVKISCKASGYTFTHYSMNWVKQAPGKGLKWMGRINTETGEP | 1629 |
| VH | LYADDFKGRFAFSLETSASTAYLVINNLKNEDTATFFCSNDYLYSCDYWGQGTTLTVS | |
| | S | |
| C13F12.1 | DIVLTQSPPSLAMSLGKRATISCRASESVTILGSHLIYWYQQKPGQPPTLLIQLASNV | 1630 |
| VL | QTGVPARFSGSGSRTDFTLTIDPVEEDDVAVYYCLQSRTIPRTFGGGTKLEIK | |
| C13F12.1 | QIQLVQSGPELKKPGETVKISCKASGYTFTHYSMNWVKQAPGKGLKWMGRINTETGEP | 1631 |
| scFv | LYADDFKGRFAFSLETSASTAYLVINNLKNEDTATFFCSNDYLYSCDYWGQGTTLTVS | |
| domain | SGGGGSGGGGSGGGGSDIVLTQSPPSLAMSLGKRATISCRASESVTILGSHLIYWYQQ | |
| | KPGQPPTLLIQLASNVQTGVPARFSGSGSRTDFTLTIDPVEEDDVAVYYCLQSRTIPR | |
| | TFGGGTKLEIK | |
| C13F12.1 | QIQLVQSGPELKKPGETVKISCKASGYTFTHYSMNWVKQAPGKGLKWMGRINTETGEP | 1632 |
| Full | LYADDFKGRFAFSLETSASTAYLVINNLKNEDTATFFCSNDYLYSCDYWGQGTTLTVS | |
| CART | SGGGGSGGGGSGGGGSDIVLTQSPPSLAMSLGKRATISCRASESVTILGSHLIYWYQQ | |
| | KPGQPPTLLIQLASNVQTGVPARFSGSGSRTDFTLTIDPVEEDDVAVYYCLQSRTIPR | |
| | TFGGGTKLEIKTTTPAPRPPTPAPTIASQPLSLRPEACRPAAGGAVHTRGLDFACDIY | |
| | IWAPLAGTCGVLLLSLVITLYCKRGRKKLLYIFKQPFMRPVQTTQEEDGCSCRFPEEE | |
| | EGGCELRVKFSRSADAPAYKQGQNQLYNELNLGRREEYDVLDKRRGRDPEMGGKPRRK | |
| | NPQEGLYNELQKDKMAEAYSEIGMKGERRRGKGHDGLYQGLSTATKDTYDALHMQALP | |
| | PR | |

TABLE 4F
Amino acid sequences of exemplary BCMA binding domains
ER26

| | | |
|---|---|---|
| SEQ ID NO: | J6M0 VH | QVQLVQSGAEVKKPGSSVKVSCKASGGTFSNYWMHWVRQAPGQ |
| 1635 | | GLEWMGATYRGHSDTYYNQKFKGRVTITADKSTSTAYMELSSLRS |
| | | EDTAVYYCARGAIYDGYDVLDNWGQGTLVTVSS |
| SEQ ID NO: | J6M0 VL | DIQMTQSPSSLSASVGDRVTITCSASQDISNYLNWYQQKPGKAPKL |
| 1636 | | LIYYTSNLHSGVPSRFSGSGSGTDFTLTISSLQPEDFATYYCQQYRK |
| | | LPWTFGQGTKLEIKR |
| SEQ ID NO: | Anti-BCMA | QVQLVQSGAEVKKPGSSVKVSCKASGGTFSNYWMHWVRQAPGQ |
| 1637 | heavy chain of | GLEWMGATYRGHSDTYYNQKFKGRVTITADKSTSTAYMELSSLRS |
| | ER26 | EDTAVYYCARGAIYNGYDVLDNWGQGTLVTVSSASTKGPSVFPLA |
| | | PSSKSTSGGTAALGCLVKDYFPEPVTVSWNSGALTSGVHTFPAVLQ |
| | | SSGLYSLSSVVTVPSSSLGTQTYICNVNHKPSNTKVDKRVEPKSCD |
| | | KTHTCPPCPAPELLGGPSVFLFPPKPKDTLMISRTPEVTCVVVAVSH |
| | | EDPEVKFNWYVDGVEVHNAKTKPREEQYNSTYRVVSVLTVLHQD |
| | | WLNGKEYKCKVSNKALAAPIEKTISKAKGQPREPQVCTLPPSREEM |
| | | TKNQVSLSCAVKGFYPSDIAVEWESNGQPENNYKTTPPVLDSDGSF |
| | | FLVSKLTVDKSRWQQGNVFSCSVMHEALHNHYTQKSLSLSPGX, |
| | | wherein X is K or absent |
| SEQ ID NO: | Anti-BCMA | DIQMTQSPSSLSASVGDRVTITCSASQDISNYLNWYQQKPGKAPKL |
| 1638 | light chain of | LIYYTSNLHSGVPSRFSGSGSGTDFTLTISSLQPEDFATYYCQQYRK |
| | ER26 | LPWTFGQGTKLEIKRTVAAPSVFIFPPSDEQLKSGTASVVCLLNNFY |
| | | PREAKVQWKVDNALQSGNSQESVTEQDSKDSTYSLSSTLTLSKAD |
| | | YEKHKVYACEVTHQGLSSPVTKSFNRGEC |

BQ76

| | | |
|---|---|---|
| SEQ ID NO: | 17A5 VH | EVQLLESGGGLVQPGGSLRLSCAASGFTFSSYAMSWVRQAPGKGL |
| 1639 | | EWVSAISGSGGSTYYADSVKGRFTISRDNSKNTLYLQMNSLRAEDT |
| | | AVYYCAKVAPYFAPFDYWGQGTLVTVSS |
| SEQ ID NO: | 17A5 VL | EIVLTQSPGTLSLSPGERATLSCRASQSVSSSYLAWYQQKPGQAPRL |
| 1640 | | LIYGASSRATGIPDRFSGSGSGTDFTLTISRLEPEDFAVYYCQQYGN |
| | | PPLYTFGQGTKVEIK |
| SEQ ID NO: | Anti-BCMA | EVQLLESGGGLVQPGGSLRLSCAASGFTFSSYAMSWVRQAPGKGL |
| 1641 | heavy chain of | EWVSAISGSGGSTYYADSVKGRFTISRDNSKNTLYLQMNSLRAEDT |
| | BQ76 | AVYYCAKVAPYFAPFDYWGQGTLVTVSSASTKGPSVFPLAPSSKST |
| | | SGGTAALGCLVKDYFPEPVTVSWNSGALTSGVHTFPAVLQSSGLY |
| | | SLSSVVTVPSSSLGTQTYICNVNHKPSNTKVDKRVEPKSCDKTHTC |
| | | PPCPAPELLGGPSVFLFPPKPKDTLMISRTPEVTCVVVDVSHEDPEV |
| | | KFNWYVDGVEVHNAKTKPREEQYASTYRVVSVLTVLHQDWLNG |
| | | KEYKCKVSNKALPAPIEKTISKAKGQPREPQVCTLPPSREEMTKNQ |
| | | VSLSCAVKGFYPSDIAVEWESNGQPENNYKTTPPVLDSDGSFFLVS |
| | | KLTVDKSRWQQGNVFSCSVMHEALHNHYTQKSLSLSPGX, wherein |
| | | X is K or absent |
| SEQ ID NO: | Anti-BCMA | EIVLTQSPGTLSLSPGERATLSCRASQSVSSSYLAWYQQKPGQAPRL |
| 1642 | light chain of | LIYGASSRATGIPDRFSGSGSGTDFTLTISRLEPEDFAVYYCQQYGN |
| | BQ76 | PPLYTFGQGTKVEIKRTVAAPSVFIFPPSDEQLKSGTASVVCLLNNF |
| | | YPREAKVQWKVDNALQSGNSQESVTEQDSKDSTYSLSSTLTLSKA |
| | | DYEKHKVYACEVTHQGLSSPVTKSFNRGEC |

BU76

| | | |
|---|---|---|
| SEQ ID NO: | C11D5 VH | QIQLVQSGPELKKPGETVKISCKASGYTFTDYSINWVKRAPGKGLK |
| 1643 | | WMGWINTETREPAYAYDFRGRFAFSLETSASTAYLQINNLKYEDT |
| | | ATYFCALDYSYAMDYWGQGTSVTVSS |
| SEQ ID NO: | C11D5 VL | DIVLTQSPPSLAMSLGKRATISCRASESVTILGSHLIHWYQQKPGQP |
| 1644 | | PTLLIQLASNVQTGVPARFSGSGSRTDFTLTIDPVEEDDVAVYYCLQ |
| | | SRTIPRTFGGGTKLEIK |
| SEQ ID NO: | Anti-BCMA | QIQLVQSGPELKKPGETVKISCKASGYTFTDYSINWVKRAPGKGLK |
| 1645 | heavy chain of | WMGWINTETREPAYAYDFRGRFAFSLETSASTAYLQINNLKYEDT |
| | BU76 | ATYFCALDYSYAMDYWGQGTSVTVSSASTKGPSVFPLAPSSKSTS |
| | | GGTAALGCLVKDYFPEPVTVSWNSGALTSGVHTFPAVLQSSGLYS |
| | | LSSVVTVPSSSLGTQTYICNVNHKPSNTKVDKRVEPKSCDKTHTCP |
| | | PCPAPELLGGPSVFLFPPKPKDTLMISRTPEVTCVVVDVSHEDPEVK |
| | | FNWYVDGVEVHNAKTKPREEQYASTYRVVSVLTVLHQDWLNGK |
| | | EYKCKVSNKALPAPIEKTISKAKGQPREPQVCTLPPSREEMTKNQV |
| | | SLSCAVKGFYPSDIAVEWESNGQPENNYKTTPPVLDSDGSFFLVSK |
| | | LTVDKSRWQQGNVFSCSVMHEALHNHYTQKSLSLSPGX, wherein |
| | | X is K or absent |
| SEQ ID NO: | Anti-BCMA | DIVLTQSPASLAMSLGKRATISCRASESVSVIGAHLIHWYQQKPGQP |
| 1646 | light chain of | PKLLIYLASNLETGVPARFSGSGSGTDFTLTIDPVEEDDVAIYSCLQS |
| | BU76 | RIFPRTFGGGTKLEIKRTVAAPSVFIFPPSDEQLKSGTASVVCLLNNF |
| | | YPREAKVQWKVDNALQSGNSQESVTEQDSKDSTYSLSSTLTLSKA |
| | | DYEKHKVYACEVTHQGLSSPVTKSFNRGEC |

EE11

| | | |
|---|---|---|
| SEQ ID NO: | 83A10 VH | EVQLLESGGGLVQPGGSLRLSCAASGFTFSSYAMSWVRQAPGKGL |
| 1647 | | EWVSAISGSGGSTYYADSVKGRFTISRDNSKNTLYLQMNSLRAEDT |
| | | AVYYCAKVLGWFDYWGQGTLVTVSS |
| SEQ ID NO: | 83A10 VL | EIVLTQSPGTLSLSPGERATLSCRASQSVSSSYLAWYQQKPGQAPRL |
| 1648 | | LIYGASSRATGIPDRFSGSGSGTDFTLTISRLEPEDFAVYYCQQYGY |
| | | PPDFTFGQGTKVEIK |
| SEQ ID NO: | Anti-BCMA | EVQLLESGGGLVQPGGSLRLSCAASGFTFSSYAMSWVRQAPGKGL |
| 1649 | scFv-Fc of | EWVSAISGSGGSTYYADSVKGRFTISRDNSKNTLYLQMNSLRAEDT |
| | EE11 | AVYYCAKVLGWFDYWGQGTLVTVSSGGGGSGGGGSGGGGSGGG |
| | | GSEIVLTQSPGTLSLSPGERATLSCRASQSVSSSYLAWYQQKPGQAP |
| | | RLLIYGASSRATGIPDRFSGSGSGTDFTLTISRLEPEDFAVYYCQQY |
| | | GYPPDFTFGQGTKVEIKGGGGSDKTHTCPPCPAPELLGGPSVFLFPP |
| | | KPKDTLMISRTPEVTCVVVAVSHEDPEVKFNWYVDGVEVHNAKT |
| | | KPREEQYNSTYRVVSVLTVLHQDWLNGKEYKCKVSNKALAAPIEK |
| | | TISKAKGQPREPQVYTLPPCRDELTKNQVSLWCLVKGFYPSDIAVE |
| | | WESNGQPENNYKTTPPVLDSDGSFFLYSKLTVDKSRWQQGNVFSC |
| | | SVMHEALHNHYTQKSLSLSPGX, wherein X is K or absent |

EM90

| | | |
|---|---|---|
| SEQ ID NO: | Comment light | QAVVTQEPSLTVSPGGTVTLTCGSSTGAVTTSNYANWVQEKPGQA |
| 1650 | chain of EM90 | FRGLIGGTNKRAPGTPARFSGSLLGGKAALTLSGAQPEDEAEYYCA |
| | | LWYSNLWVFGGGTKLTVLGQPKAAPSVTLFPPSSEELQANKATLV |
| | | CLISDFYPGAVTVAWKADSSPVKAGVETTTPSKQSNNKYAASSYLS |
| | | LTPEQWKSHRSYSCQVTHEGSTVEKTVAPTECS |
| SEQ ID NO: | Anti-BCMA | EVQLVESGGGLVKPGGSLRLSCAASGFTFSNSGMIWVRQAPGKGL |
| 1651 | heavy chain of | EWVGHIRSKTDGGTTDYAAPVKGRFTISRDDSKNTLYLQMNSLKT |
| | EM90 | EDTAVYYCTTGGSGSFDYWGQGTLVTVSSASTKGPSVFPLAPSSKS |
| | | TSGGTAALGCLVKDYFPEPVTVSWNSGALTSGVHTFPAVLQSSGL |
| | | YSLSSVVTVPSSSLGTQTYICNVNHKPSNTKVDKRVEPKSCDKTHT |
| | | CPPCPAPEAAGGPSVFLFPPKPKDTLMISRTPEVTCVVVDVSHEDPE |
| | | VKFNWYVDGVEVHNAKTKPREEQYNSTYRVVSVLTVLHQDWLN |
| | | GKEYKCKVSNKALPAPIEKTISKAKGQPREPQVCTLPPSREEMTKN |
| | | QVSLSCAVKGFYPSDIAVEWESNGQPENNYKTTPPVLDSDGSFFLV |
| | | SKLTVDKSRWQQGNVFSCSVMHEALHNHYTQKSLSLSPGX, |
| | | wherein X is K or absent |

TABLE 4G
Heavy Chain Variable Domain CDRs according to the Kabat numbering scheme
(Kabat et al. (1991), ″Sequences of Proteins of Immunological Interest,″ 5th Ed.
Public Health Service, National Institutes of Health, Bethesda, MD)

| Candidate | HCDR1 | ID | HCDR2 | ID | HCDR3 | ID |
|---|---|---|---|---|---|---|
| 139109 | NHGMS | 1652 | GIVYSGSTYYAASV | 1701 | HGGESDV | 1741 |
| | | | KG | | | |
| 139103 | NYAMS | 1653 | GISRSGENTYYADS | 1702 | SPAHYYGGMDV | 1742 |
| | | | VKG | | | |
| 139105 | DYAMH | 1654 | GISWNSGSIGYADSV | 1703 | HSFLAY | 1743 |
| | | | KG | | | |
| 139111 | NHGMS | 1655 | GIVYSGSTYYAASV | 1704 | HGGESDV | 1744 |
| | | | KG | | | |
| 139100 | NFGIN | 1656 | WINPKNNNTNYAQ | 1705 | GPYYYQSYMDV | 1745 |
| | | | KFQG | | | |
| 139101 | SDAMT | 1657 | VISGSGGTTYYADS | 1706 | LDSSGYYYARGPRY | 1746 |
| | | | VKG | | | |
| 139102 | NYGIT | 1658 | WISAYNGNTNYAQ | 1707 | GPYYYYMDV | 1747 |
| | | | KFQG | | | |
| 139104 | NHGMS | 1659 | GIVYSGSTYYAASV | 1708 | HGGESDV | 1748 |
| | | | KG | | | |
| 139106 | NHGMS | 1670 | GIVYSGSTYYAASV | 1709 | HGGESDV | 1749 |
| | | | KG | | | |
| 139107 | NHGMS | 1671 | GIVYSGSTYYAASV | 1710 | HGGESDV | 1750 |
| | | | KG | | | |
| 139108 | DYYMS | 1672 | YISSSGSTIYYADSV | 1711 | ESGDGMDV | 1751 |
| | | | KG | | | |
| 139110 | DYYMS | 1672 | YISSSGNTIYYADSV | 1712 | STMVREDY | 1752 |
| | | | KG | | | |
| 139112 | NHGMS | 1673 | GIVYSGSTYYAASV | 1713 | HGGESDV | 1753 |
| | | | KG | | | |
| 139113 | NHGMS | 1674 | GIVYSGSTYYAASV | 1714 | HGGESDV | 1754 |
| | | | KG | | | |
| 139114 | NHGMS | 1675 | GIVYSGSTYYAASV | 1715 | HGGESDV | 1755 |
| | | | KG | | | |
| 149362 | SSYYYW | 1676 | SIYYSGSAYYNPSLK | 1716 | HWQEWPDAFDI | 1756 |
| | G | | S | | | |
| 149363 | TSGMCV | 1677 | RIDWDEDKFYSTSL | 1717 | SGAGGTSATAFDI | 1757 |
| | S | | KT | | | |
| 149364 | SYSMN | 1678 | SISSSSSYIYYADSVK | 1718 | TIAAVYAFDI | 1758 |
| | | | G | | | |
| 149365 | DYYMS | 1679 | YISSSGSTIYYADSV | 1719 | DLRGAFDI | 1759 |
| | | | KG | | | |
| 149366 | SHYIH | 1680 | MINPSGGVTAYSQT | 1720 | EGSGSGWYFDF | 1760 |
| | | | LQG | | | |
| 149367 | SGGYY | 1681 | YIYYSGSTYYNPSLK | 1721 | AGIAARLRGAFDI | 1761 |
| | WS | | S | | | |
| 149368 | SYAIS | 1682 | GIIPIFGTANYAQKF | 1722 | RGGYQLLRWDVGLL | 1762 |
| | | | QG | | RSAFDI | |
| 149369 | SNSAAW | 1683 | RTYYRSKWYSFYAI | 1723 | SSPEGLFLYWFDP | 1763 |
| | N | | SLKS | | | |
| BCMA_EBB- | SYAMS | 1684 | AISGSGGSTYYADS | 1724 | VEGSGSLDY | 1764 |
| C1978-A4 | | | VKG | | | |
| BCMA_EBB- | RYPMS | 1685 | GISDSGVSTYYADS | 1725 | RAGSEASDI | 1765 |
| C1978-G1 | | | AKG | | | |
| BCMA_EBB- | SYAMS | 1686 | AISGSGGSTYYADS | 1726 | ATYKRELRYYYGM | 1766 |
| C1979-C1 | VKG | | DV | | | |
| BCMA_EBB- | SYAMS | 1687 | AISGSGGSTYYADS | 1727 | ATYKRELRYYYGM | 1767 |
| C1978-C7 | | | VKG | | DV | |
| BCMA_EBB- | DYAMH | 1688 | GISWNSGSIGYADSV | 1728 | VGKAVPDV | 1768 |
| C1978-D10 | | | KG | | | |
| BCMA_EBB- | DYAMH | 1689 | SINWKGNSLAYGDS | 1729 | HQGVAYYNYAMDV | 1769 |
| C1979-C12 | | | VKG | | | |
| BCMA_EBB- | SYAMS | 1690 | AISGSGGSTYYADS | 1730 | VVRDGMDV | 1770 |
| C1980-G4 | | | VKG | | | |
| BCMA_EBB- | SYAMS | 1691 | AISGSGGSTYYADS | 1731 | IPQTGTFDY | 1771 |
| C1980-D2 | | | VKG | | | |
| BCMA_EBB- | SYAMS | 1692 | AISGSGGSTYYADS | 1732 | ANYKRELRYYYGM | 1772 |
| C1978-A10 | | | VKG | | DV | |
| BCMA_EBB- | SYAMS | 1693 | AISGSGGSTYYADS | 1733 | ALVGATGAFDI | 1773 |
| C1978-D4 | | | VKG | | | |
| BCMA_EBB- | SYAMS | 1694 | AISGSGGSTYYADS | 1734 | WFGEGFDP | 1774 |
| C1980-A2 | | | VKG | | | |
| BCMA_EBB- | SYAMS | 1695 | AISGSGGSTYYADS | 1735 | VGYDSSGYYRDYYG | 1775 |
| C1981-C3 | | | VKG | | MDV | |
| BCMA_EBB- | SYAMS | 1696 | AISGSGGSTYYADS | 1736 | MGWSSGYLGAFDI | 1776 |
| C1978-G4 | | | VKG | | | |
| A7D12.2 | NFGMN | 1697 | WINTYTGESYFADD | 1737 | GEIYYGYDGGFAY | 1777 |
| | | | FKG | | | |
| C11D5.3 | DYSIN | 1698 | WINTETREPAYAYD | 1738 | DYSYAMDY | 1778 |
| | | | FRG | | | |
| C12A3.2 | HYSMN | 1699 | RINTESGVPIYADDF | 1739 | DYLYSLDF | 1779 |
| | | | KG | | | |
| C13F12.1 | HYSMN | 1700 | RINTETGEPLYADDF | 1740 | DYLYSCDY | 1800 |
| | | | KG | | | |

TABLE 4H
Light Chain Variable Domain CDRs according to the Kabat numbering scheme
(Kabat et al. (1991), ″Sequences of Proteins of Immunological Interest,″ 5th Ed.
Public Health Service, National Institutes of Health, Bethesda, MD).

| Candidate | LCDR1 | ID | LCDR2 | ID | LCDR3 | ID |
|---|---|---|---|---|---|---|
| 139109 | RASQSISSYLN | 2514 | AASSLQS | 2554 | QQSYSTPYT | 2594 |
| 139103 | RASQSISSSFLA | 2504 | GASRRAT | 2544 | QQYHSSPSWT | 2584 |
| 139105 | RSSQSLLHSNGYN | 2505 | LGSNRAS | 2545 | mQALQTPYT | 2585 |
| | YLD | | | | | |
| 139111 | KSSQSLLRNDGKTP | 2506 | EVSNRFS | 2546 | MQNIQFPS | 2586 |
| | LY | | | | | |
| 139100 | RSSQSLLHSNGYN | 2507 | LGSKRAS | 2547 | MQALQTPYT | 2587 |
| | YLN | | | | | |
| 139101 | RASQSISSYLN | 2508 | GASTLAS | 2548 | QQSYKRAS | 2588 |
| 139102 | RSSQSLLYSNGYN | 2509 | LGSNRAS | 2549 | MQGRQFPYS | 2589 |
| | YVD | | | | | |
| 139104 | RASQSVSSNLA | 2510 | GASTRAS | 2550 | QQYGSSLT | 2590 |
| 139106 | RASQSVSSKLA | 2511 | GASIRAT | 2551 | QQYGSSSWT | 2591 |
| 139107 | RASQSVGSTNLA | 2512 | DASNRAT | 2552 | QQYGSSPPWT | 2592 |
| 139108 | RASQSISSYLN | 2513 | AASSLQS | 2553 | QQSYTLA | 2593 |
| 139110 | KSSESLVHNSGKTY | 2515 | EVSNRDS | 2555 | MQGTHWPGT | 2595 |
| | LN | | | | | |
| 139112 | QASEDINKFLN | 2516 | DASTLQT | 2556 | QQYESLPLT | 2596 |
| 139113 | RASQSVGSNLA | 2517 | GASTRAT | 2557 | QQYNDWLPV | 2597 |
| | | | | | T | |
| 139114 | RASQSIGSSSLA | 2518 | GASSRAS | 2558 | QQYAGSPPFT | 2598 |
| 149362 | KASQDIDDAMN | 2519 | SATSPVP | 2559 | LQHDNFPLT | 2599 |
| 149363 | RASQDIYNNLA | 2520 | AANKSQS | 2560 | QHYYRFPYS | 2600 |
| 149364 | RSSQSLLHSNGYN | 2521 | LGSNRAS | 2561 | MQALQTPYT | 2601 |
| | YLD | | | | | |
| 149365 | GGNNIGTKSVH | 2522 | DDSVRPS | 2562 | QVWDSDSEH | 2602 |
| | | | | | VV | |
| 149366 | SGDGLSKKYVS | 2523 | RDKERPS | 2563 | QAWDDTTVV | 2603 |
| 149367 | RASQGIRNWLA | 2524 | AASNLQS | 2564 | QKYNSAPFT | 2604 |
| 149368 | GGNNIGSKSVH | 2525 | GKNNRPS | 2565 | SSRDSSGDHL | 2605 |
| | | | | | RV | |
| 149369 | QGDSLGNYYAT | 2526 | GTNNRPS | 2566 | NSRDSSGHHL | 2606 |
| | | | | | L | |
| BCMA_EBB- | RASQSVSSAYLA | 2527 | GASTRAT | 2567 | QHYGSSFNGS | 2607 |
| C1978-A4 | | | | | SLFT | |
| BCMA_EBB- | RASQSVSNSLA | 2528 | DASSRAT | 2568 | QQFGTSSGLT | 2608 |
| C1978-G1 | | | | | | |
| BCMA_EBB- | RASQSVSSSFLA | 2529 | GASSRAT | 2569 | QQYHSSPSWT | 2609 |
| C1979-C1 | | | | | | |
| BCMA_EBB- | RASQSVSTTFLA | 2530 | GSSNRAT | 2570 | QQYHSSPSWT | 2610 |
| C1978-C7 | | | | | | |
| BCMA_EBB- | RASQSISSYLN | 2531 | AASSLQS | 2571 | QQSYSTPYS | 2611 |
| C1978-D10 | | | | | | |
| BCMA_EBB- | RATQSIGSSFLA | 2532 | GASQRAT | 2572 | QHYESSPSWT | 2612 |
| C1979-C12 | | | | | | |
| BCMA_EBB- | RASQSVSSSYLA | 2533 | GASSRAT | 2573 | QQYGSPPRFT | 2613 |
| C1980-G4 | | | | | | |
| BCMA_EBB- | RASQSVSSSYLA | 2534 | GASSRAT | 2574 | QHYGSSPSWT | 2614 |
| C1980-D2 | | | | | | |
| BCMA_EBB- | RASQRVASNYLA | 2535 | GASSRAT | 2575 | QHYDSSPSWT | 2615 |
| C1978-A10 | | | | | | |
| BCMA_EBB- | RASQSLSSNFLA | 2536 | GASNWAT | 2576 | QYYGTSPMY | 2616 |
| C1978-D4 | | | | | T | |
| BCMA_EBB- | RSSQSLLHSNGYN | 2537 | LGSNRAS | 2577 | MQALQTPLT | 2617 |
| C1980-A2 | YLD | | | | | |
| BCMA_EBB- | RASQSVSSSYLA | 2538 | GTSSRAT | 2578 | QHYGNSPPKF | 2618 |
| C1981-C3 | | | | | T | |
| BCMA_EBB- | RASQSVASSFLA | 2539 | GASGRAT | 2579 | QHYGGSPRLT | 2619 |
| C1978-G4 | | | | | | |
| A7D12.2 | RASQDVNTAVS | 2540 | SASYRYT | 2580 | QQHYSTPWT | 2620 |
| C11D5.3 | RASESVSVIGAHLI | 2541 | LASNLET | 2581 | LQSRIFPRT | 2621 |
| | H | | | | | |
| C12A3.2 | RASESVTILGSHLIY | 2542 | LASNVQT | 2582 | LQSRTIPRT | 2622 |
| C13F12.1 | RASESVTILGSHLIY | 2543 | LASNVQT | 2583 | LQSRTIPRT | 2623 |

TABLE 4I
Heavy Chain Variable Domain CDRs according to a combination of the Kabat numbering
scheme (Kabat et al. (1991), ″Sequences of Proteins of Immunological Interest,″ 5th
Ed. Public Health Service, National Institutes of Health, Bethesda, MD) and the Chothia
numbering scheme (A1-Lazikani et al., (1997) JMB 273,927-948).

| Candidate | HCDR1 | ID | HCDR2 | ID | HCDR3 | ID |
|---|---|---|---|---|---|---|
| 139109 | GFALSNHGMS | 2874 | GIVYSGSTYYAAS | 2914 | HGGESDV | 2954 |
| | | | VKG | | | |
| 139103 | GFTFSNYAMS | 2864 | GISRSGENTYYAD | 2904 | SPAHYYGGMDV | 2944 |
| | | | SVKG | | | |
| 139105 | GFTFDDYAMH | 2865 | GISWNSGSIGYAD | 2905 | HSFLAY | 2945 |
| | | | SVKG | | | |
| 139111 | GFALSNHGMS | 2866 | GIVYSGSTYYAAS | 2906 | HGGESDV | 2946 |
| | | | VKG | | | |
| 139100 | GYIFDNFGIN | 2867 | WINPKNNNTNYA | 2907 | GPYYYQSYMDV | 2947 |
| | | | QKFQG | | | |
| 139101 | GFTFSSDAMT | 2868 | VISGSGGTTYYAD | 2908 | LDSSGYYYARGPR | 2948 |
| | | | SVKG | | Y | |
| 139102 | GYTFSNYGIT | 2869 | WISAYNGNTNYA | 2909 | GPYYYYMDV | 2949 |
| | | | QKFQG | | | |
| 139104 | GFALSNHGMS | 2870 | GIVYSGSTYYAAS | 2910 | HGGESDV | 2950 |
| | | | VKG | | | |
| 139106 | GFALSNHGMS | 2871 | GIVYSGSTYYAAS | 2911 | HGGESDV | 2951 |
| | | | VKG | | | |
| 139107 | GFALSNHGMS | 2872 | GIVYSGSTYYAAS | 2912 | HGGESDV | 2952 |
| | | | VKG | | | |
| 139108 | GFTFSDYYMS | 2873 | YISSSGSTIYYADS | 2913 | ESGDGMDV | 2953 |
| | | | VKG | | | |
| 139110 | GFTFSDYYMS | 2875 | YISSSGNTIYYAD | 2915 | STMVREDY | 2955 |
| | | | SVKG | | | |
| 139112 | GFALSNHGMS | 2876 | GIVYSGSTYYAAS | 2916 | HGGESDV | 2956 |
| | | | VKG | | | |
| 139113 | GFALSNHGMS | 2877 | GIVYSGSTYYAAS | 2917 | HGGESDV | 2957 |
| | | | VKG | | | |
| 139114 | GFALSNHGMS | 2878 | GIVYSGSTYYAAS | 2918 | HGGESDV | 2958 |
| | | | VKG | | | |
| 149362 | GGSISSSYYYW | 2879 | SIYYSGSAYYNPS | 2919 | HWQEWPDAFDI | 2959 |
| | G | | LKS | | | |
| 149363 | GFSLRTSGMC | 2880 | RIDWDEDKFYSTS | 2920 | SGAGGTSATAFDI | 2960 |
| | VS | | LKT | | | |
| 149364 | GFTFSSYSMN | 2881 | SISSSSSYIYYADS | 2921 | TIAAVYAFDI | 2961 |
| | | | VKG | | | |
| 149365 | GFTFSDYYMS | 2882 | YISSSGSTIYYADS | 2922 | DLRGAFDI | 2962 |
| | | | VKG | | | |
| 149366 | GYTVTSHYIH | 2883 | MINPSGGVTAYS | 2923 | EGSGSGWYFDF | 2963 |
| | | | QTLQG | | | |
| 149367 | GGSISSGGYY | 2884 | YIYYSGSTYYNPS | 2924 | AGIAARLRGAFDI | 2964 |
| | WS | | LKS | | | |
| 149368 | GGTFSSYAIS | 2885 | GIIPIFGTANYAQ | 2925 | RGGYQLLRWDVG | 2965 |
| | | | KFQG | | LLRSAFDI | |
| 149369 | GDSVSSNSAA | 2886 | RTYYRSKWYSFY | 2926 | SSPEGLFLYWFDP | 2966 |
| | WN | | AISLKS | | | |
| BCMA_EBB- | GFTFSSYAMS | 2887 | AISGSGGSTYYAD | 2927 | VEGSGSLDY | 2967 |
| C1978-A4 | | | SVKG | | | |
| BCMA_EBB- | GITFSRYPMS | 2888 | GISDSGVSTYYAD | 2928 | RAGSEASDI | 2968 |
| C1978-G1 | | | SAKG | | | |
| BCMA_EBB- | GFTFSSYAMS | 2889 | AISGSGGSTYYAD | 2929 | ATYKRELRYYYG | 2969 |
| C1979-C1 | | | SVKG | | MDV | |
| BCMA_EBB- | GFTFSSYAMS | 2890 | AISGSGGSTYYAD | 2930 | ATYKRELRYYYG | 2970 |
| C1978-C7 | | | SVKG | | MDV | |
| BCMA_EBB- | GFTFDDYAMH | 2891 | GISWNSGSIGYAD | 2931 | VGKAVPDV | 2971 |
| C1978-D10 | | | SVKG | | | |
| BCMA_EBB- | GFTFDDYAMH | 2892 | SINWKGNSLAYG | 2932 | HQGVAYYNYAM | 2972 |
| C1979-C12 | | | DSVKG | | DV | |
| BCMA_EBB- | GFTFSSYAMS | 2893 | AISGSGGSTYYAD | 2933 | VVRDGMDV | 2973 |
| C1980-G4 | | | SVKG | | | |
| BCMA_EBB- | GFTFSSYAMS | 2894 | AISGSGGSTYYAD | 2934 | IPQTGTFDY | 2974 |
| C1980-D2 | | | SVKG | | | |
| BCMA_EBB- | GFTFSSYAMS | 2895 | AISGSGGSTYYAD | 2935 | ANYKRELRYYYG | 2975 |
| C1978-A10 | | | SVKG | | MDV | |
| BCMA_EBB- | GFSFSSYAMS | 2896 | AISGSGGSTYYAD | 2936 | ALVGATGAFDI | 2976 |
| C1978-D4 | | | SVKG | | | |
| BCMA_EBB- | GFTFSSYAMS | 2897 | AISGSGGSTYYAD | 2937 | WFGEGFDP | 2977 |
| C1980-A2 | | | SVKG | | | |
| BCMA_EBB- | GFTFSSYAMS | 2898 | AISGSGGSTYYAD | 2938 | VGYDSSGYYRDY | 2978 |
| C1981-C3 | | | SVKG | | YGMDV | |
| BCMA_EBB- | GFTFSSYAMS | 2899 | AISGSGGSTYYAD | 2939 | MGWSSGYLGAFD | 2979 |
| C1978-G4 | | | SVKG | | I | |
| A7D12.2 | GYTFTNFGMN | 2900 | WINTYTGESYFA | 2940 | GEIYYGYDGGFAY | 2980 |
| | | | DDFKG | | | |
| C11D5.3 | GYTFTDYSIN | 2901 | WINTETREPAYA | 2941 | DYSYAMDY | 2981 |
| | | | YDFRG | | | |
| C12A3.2 | GYTFRHYSMN | 2902 | RINTESGVPIYAD | 2942 | DYLYSLDF | 2982 |
| | | | DFKG | | | |
| C13F12.1 | GYTFTHYSMN | 2903 | RINTETGEPLYAD | 2943 | DYLYSCDY | 2983 |
| | | | DFKG | | | |

TABLE 4J
Light Chain Variable Domain CDRs according to a combination of the Kabat
numbering scheme (Kabat et al. (1991), ″Sequences of Proteins of Immunological
Interest,″ 5th Ed. Public Health Service, National Institutes of Health,
Bethesda, MD) and the Chothia numbering scheme (A1-Lazikani et al., (1997)
JMB 273,927-948).

| Candidate | LCDR1 | ID | LCDR2 | ID | LCDR3 | ID |
|---|---|---|---|---|---|---|
| 139109 | RASQSISSYLN | 3994 | AASSLQS | 1034 | QQSYSTPYT | 3074 |
| 139103 | RASQSISSSFLA | 3984 | GASRRAT | 3024 | QQYHSSPSWT | 3064 |
| 139105 | RSSQSLLHSNGYNYLD | 3985 | LGSNRAS | 3025 | MQALQTPYT | 3065 |
| 139111 | KSSQSLLRNDGKTPLY | 3986 | EVSNRFS | 3026 | MQNIQFPS | 3066 |
| 139100 | RSSQSLLHSNGYNYLN | 3987 | LGSKRAS | 3027 | MQALQTPYT | 3067 |
| 139101 | RASQSISSYLN | 3988 | GASTLAS | 3028 | QQSYKRAS | 3068 |
| 139102 | RSSQSLLYSNGYNYVD | 3989 | LGSNRAS | 3029 | MQGRQFPYS | 3069 |
| 139104 | RASQSVSSNLA | 3990 | GASTRAS | 3030 | QQYGSSLT | 3070 |
| 139106 | RASQSVSSKLA | 3991 | GASIRAT | 3031 | QQYGSSSWT | 3071 |
| 139107 | RASQSVGSTNLA | 3992 | DASNRAT | 3032 | QQYGSSPPWT | 3072 |
| 139108 | RASQSISSYLN | 3993 | AASSLQS | 3033 | QQSYTLA | 3073 |
| 139110 | KSSESLVHNSGKTYLN | 3995 | EVSNRDS | 3035 | MQGTHWPGT | 3075 |
| 139112 | QASEDINKFLN | 3996 | DASTLQT | 3036 | QQYESLPLT | 3076 |
| 139113 | RASQSVGSNLA | 3997 | GASTRAT | 3037 | QQYNDWLPV | 3077 |
| | | | | | T | |
| 139114 | RASQSIGSSSLA | 3998 | GASSRAS | 3038 | QQYAGSPPFT | 3078 |
| 149362 | KASQDIDDAMN | 3999 | SATSPVP | 3039 | LQHDNFPLT | 3079 |
| 149363 | RASQDIYNNLA | 3000 | AANKSQS | 3040 | QHYYRFPYS | 3080 |
| 149364 | RSSQSLLHSNGYNYLD | 3001 | LGSNRAS | 3041 | MQALQTPYT | 3081 |
| 149365 | GGNNIGTKSVH | 3002 | DDSVRPS | 3042 | QVWDSDSEHV | 3082 |
| | | | | | V | |
| 149366 | SGDGLSKKYVS | 3003 | RDKERPS | 3043 | QAWDDTTVV | 3083 |
| 149367 | RASQGIRNWLA | 3004 | AASNLQS | 3044 | QKYNSAPFT | 3084 |
| 149368 | GGNNIGSKSVH | 3005 | GKNNRPS | 3045 | SSRDSSGDHL | 3085 |
| | | | | | RV | |
| 149369 | QGDSLGNYYAT | 3006 | GTNNRPS | 3046 | NSRDSSGHHL | 3086 |
| | | | | | L | |
| BCMA_EBB- | RASQSVSSAYLA | 3007 | GASTRAT | 3047 | QHYGSSFNGS | 3087 |
| C1978-A4 | | | | | SLFT | |
| BCMA_EBB- | RASQSVSNSLA | 3008 | DASSRAT | 3048 | QQFGTSSGLT | 3088 |
| C1978-G1 | | | | | | |
| BCMA_EBB- | RASQSVSSSFLA | 3009 | GASSRAT | 3049 | QQYHSSPSWT | 3089 |
| C1979-C1 | | | | | | |
| BCMA_EBB- | RASQSVSTTFLA | 3010 | GSSNRAT | 3050 | QQYHSSPSWT | 3090 |
| C1978-C7 | | | | | | |
| BCMA_EBB- | RASQSISSYLN | 3011 | AASSLQS | 3051 | QQSYSTPYS | 3091 |
| C1978-D10 | | | | | | |
| BCMA_EBB- | RATQSIGSSFLA | 3012 | GASQRAT | 3052 | QHYESSPSWT | 3092 |
| C1979-C12 | | | | | | |
| BCMA_EBB- | RASQSVSSSYLA | 3013 | GASSRAT | 3053 | QQYGSPPRFT | 3093 |
| C1980-G4 | | | | | | |
| BCMA_EBB- | RASQSVSSSYLA | 3014 | GASSRAT | 3054 | QHYGSSPSWT | 3094 |
| C1980-D2 | | | | | | |
| BCMA_EBB- | RASQRVASNYLA | 3015 | GASSRAT | 3055 | QHYDSSPSWT | 3095 |
| C1978-A10 | | | | | | |
| BCMA_EBB- | RASQSLSSNFLA | 3016 | GASNWAT | 3056 | QYYGTSPMYT | 3096 |
| C1978-D4 | | | | | | |
| BCMA_EBB- | RSSQSLLHSNGYNYLD | 3017 | LGSNRAS | 3057 | MQALQTPLT | 3097 |
| C1980-A2 | | | | | | |
| BCMA_EBB- | RASQSVSSSYLA | 3018 | GTSSRAT | 3058 | QHYGNSPPKF | 3098 |
| C1981-C3 | | | | | T | |
| BCMA_EBB- | RASQSVASSFLA | 3019 | GASGRAT | 3059 | QHYGGSPRLT | 3099 |
| C1978-G4 | | | | | | |
| A7D12.2 | RASQDVNTAVS | 3020 | SASYRYT | 3060 | QQHYSTPWT | 3100 |
| C11D5.3 | RASESVSVIGAHLIH | 3021 | LASNLET | 3061 | LQSRIFPRT | 3101 |
| C12A3.2 | RASESVTILGSHLIY | 3022 | LASNVQT | 3062 | LQSRTIPRT | 3102 |
| C13F12.1 | RASESVTILGSHLIY | 3023 | LASNVQT | 3063 | LQSRTIPRT | 3103 |

[0584] In some embodiments, the method comprises administering a Chimeric Antigen Receptor (CAR) molecule that binds CD 19 in combination with a B-cell inhibitor, for example, one or more (e.g., one, two, three or more) B-cell inhibitors. In some embodiments, the B-cell inhibitor is chosen from an inhibitor of CD10, CD19, CD20, CD22, CD34, CD123, FLT-3, or ROR1, or a combination thereof. In some embodiments, the combination maintains or has better clinical effectiveness as compared to either therapy alone. In some embodiments, the methods herein involve the use of engineered cells, e.g., T cells, to express a CAR molecule that binds CD19, in combination with a B-cell inhibitor (e.g., an antibody (e.g., a mono- or bispecific antibody) to a second B target, e.g., CD10, CD19, CD20, CD22, CD34, CD123, FLT-3, or ROR1) or a CAR-expressing cell e.g., a CAR-expressing immune effector cell, that binds to the second B cell target, or a combination thereof) to treat the disorder associated with expression of CD19. The disclosure additionally features novel antigen binding domains and CAR molecules directed to CD20 and CD22, and uses, e.g., as monotherapies or in combination therapies.

[0585] Accordingly, in one aspect, the invention pertains to a method of treating a subject (e.g., a mammal) having a disease associated with expression of CD19. The method comprises administering to the subject a CD19 inhibitor, e.g., a CAR molecule that binds CD19 described herein, in combination with a B-cell inhibitor. For instance, the method comprises administering to the subject an effective number of one or more cells that express a CAR molecule that binds CD19, e.g., a CAR molecule that binds CD19 described herein (e.g., a wild-type or mutant CD19), in combination with a B-cell inhibitor. In certain embodiments, the B-cell inhibitor is chosen from a CD10 inhibitor, e.g., one or more CD10 inhibitors described herein; a CD20 inhibitor, e.g., one or more CD20 inhibitor described herein; a CD22 inhibitor, e.g., one or more CD22 inhibitors described herein; a CD34 inhibitor, e.g., one or more CD34 inhibitors described herein; a CD123 inhibitor, e.g., one or more CD123 inhibitor described herein; a FLT-3 inhibitor, e.g., one or more FLT-3 inhibitors described herein; an ROR1 inhibitor, e.g., one or more ROR1 inhibitor described herein; a CD79b inhibitor, e.g., one or more CD79b inhibitor described herein; a CD179b inhibitor, e.g., one or more CD179b inhibitor described herein; a CD79a inhibitor, e.g., one or more CD79a inhibitor described herein or any combination thereof. In certain aspects, a method of treating a subject having a B-cell leukemia or B-cell lymphoma, comprising administering to the subject an effective number of one or more cells that express a CAR molecule that binds CD19, in combination with one or more inhibitors of CD10, CD20, CD22, CD34, CD123, FLT-3, ROR1, CD79b, CD179b, or CD79a is disclosed.

[0586] In a related aspect, the present disclosure provides a method of reducing the proliferation of CD19-expressing cells, e.g., by administering to a subject, e.g., a patient in need thereof, a combination therapy as described herein, e.g., a CD19 inhibitor in combination with a B-cell inhibitor, e.g., one or more B-cell inhibitors as described herein. In another aspect, the present disclosure provides a method of selectively killing CD19-expressing cells, e.g., by administering to a subject, e.g., a patient in need thereof, a combination therapy as described herein, e.g., a CD19 inhibitor in combination with a B-cell inhibitor, e.g., one or more B-cell inhibitors as described herein. In certain aspects, the disclosure provides a method of providing an anti-tumor immunity in a subject, e.g., a mammal, comprising administering to the mammal an effective amount of a combination (e.g., one or more CAR-expressing cells) as described herein.

[0587] In an aspect, the disclosure provides a method of preventing a CD19-negative relapse in a mammal, comprising administering to the mammal one or more B-cell inhibitors, wherein the B-cell inhibitor comprises an inhibitor of one or more of CD10, CD20, CD22, CD34, CD123, FLT-3, ROR1, CD79b, CD179b, or CD79a.

### CD20 Inhibitors and Binding Domains

[0588] CD20 inhibitors and binding domains, exemplary CD20 inhibitors, and methods of using the same are described e.g., on pages 126-136 of International Application WO 2016/164731, filed Apr. 8, 2016, which is incorporated by reference in its entirety.

[0589] In one aspect the antigen-binding portion of the CAR recognizes and binds an antigen within the extracellular domain of the CD20 protein. In one aspect, the CD20 protein is expressed on a cancer cell. In some aspects, the present disclosure provides a CD20 inhibitor or binding domain, e.g., a CD20 inhibitor or binding domain as described herein. The composition may also comprise a second agent, e.g., an anti-CD19 CAR-expressing cell or a CD19 binding domain.

[0590] In one embodiment, the CD20 inhibitor is an anti-CD20 expressing cell, e.g., CD20 CART or CD20-expressing NK cell.

[0591] Design, function, and sequences of CD20 CAR-expressing cells, e.g., CD20 CARTs, and methods of using the same are described on pages 127-136 of International Application WO 2016/164731, filed Apr. 8, 2016, which is incorporated by reference in its entirety. CD20 binding domains are described in Tables 11-15B on pages 422-454 of International Application WO 2016/164731.

### CD22 Inhibitors and Binding Domains

[0592] CD22 inhibitors and binding domains, exemplary CD22 inhibitors, and methods of using the same are described e.g., on pages 136-146 of International Application WO 2016/164731, filed Apr. 8, 2016, which is incorporated by reference in its entirety.

[0593] In one aspect the antigen-binding portion of the CAR recognizes and binds an antigen within the extracellular domain of the CD22 protein. In one aspect, the CD22 protein is expressed on a cancer cell. In some aspects, the present disclosure provides a CD22 inhibitor or binding domain, e.g., a CD22 inhibitor or binding domain as described herein. The composition may also comprise a second agent, e.g., an anti-CD19 CAR-expressing cell or a CD19 binding domain.

[0594] In some aspects, a CD22 inhibitor or binding domain is administered as a monotherapy. In some aspects, the CD22 inhibitor or binding domain is administered in combination with a second agent such as an anti-CD19 CAR-expressing cell. In an embodiment, the CD22 inhibitor is administered in combination with a CD19 inhibitor, e.g., a CD19 CAR-expressing cell, e.g., a CAR-expressing cell described herein e.g., a cell expressing a CAR comprising an antibody binding domain that is murine, human, or humanized.

[0595] In one embodiment, the CD22 inhibitor is a CD22 CAR-expressing cell, e.g., a CD22-CAR that comprises a CD22 binding domain and is engineered into a cell (e.g., T cell or NK cell) for administration in combination with CD19 CAR-expressing cell, e.g., CART, and methods of their use for adoptive therapy.

[0596] Design, function, and sequences of CD22 CAR-expressing cells, e.g., CD22 CARTs, and methods of using the same are described on pages 137-143 of International Application WO 2016/164731, filed Apr. 8, 2016, which is incorporated by reference in its entirety.

[0597] In one embodiment, the CD22 inhibitor is a CD22 inhibitor described herein. The CD22 inhibitor can be, e.g., an anti-CD22 antibody (e.g., an anti-CD22 mono- or bispecific antibody), a small molecule, or a CD22 CART. In some embodiments the anti-CD22 antibody is conjugated or otherwise bound to a therapeutic agent. Exemplary therapeutic agents include, e.g., microtubule disrupting agents (e.g., monomethyl auristatin E) and toxins (e.g., diphtheria toxin or Pseudomonas exotoxin-A, ricin). In an embodiment, the CD22 inhibitor is administered in combination with a CD19 inhibitor, e.g., a CD19 CAR-expressing cell, e.g., a CAR-expressing cell described herein e.g., a cell expressing a CAR comprising an antibody binding domain that is murine, human, or humanized.

[0598] In one embodiment, the anti-CD22 antibody is selected from an anti-CD19/CD22 bispecific ligand-directed toxin (e.g., two scFv ligands, recognizing human CD19 and CD22, linked to the first 389 amino acids of diphtheria toxin (DT), DT 390, e.g., DT2219ARL); anti-CD22 monoclonal antibody-MMAE conjugate (e.g., DCDT2980S); scFv of an anti-CD22 antibody RFB4 fused to a fragment of Pseudornonas exotoxin-A (e.g., BL22); deglycosylated ricin A chain-conjugated anti-CD19/anti-CD22 (e.g., Combotox); humanized anti-CD22 monoclonal antibody (e.g., epratuzumab); or the Fv portion of an anti-CD22 antibody covalently fused to a 38 KDa fragment of Pseudomonas exotoxin-A (e.g., moxetumomab pasudotox).

[0599] CD22 inhibitor dosing is described on pages 144-146 of International Application WO 2016/164731, filed Apr. 8, 2016, which is incorporated by reference in its entirety.

[0600] CDRs of a CD22 antibody molecule are described in Table 7A, 7B, 7C, 8A and/or 8B on pages 406-414 of International Application WO 2016/164731, filed Apr. 8, 2016, which is incorporated by reference in its entirety.

CD123 inhibitors

[0601] CD123 inhibitors and binding domains, exemplary CD123 inhibitors, and methods of using the same are described e.g., on pages 53-56, and 149-151 of International Application WO 2016/164731, filed Apr. 8, 2016, which is incorporated by reference in its entirety.

[0602] In one aspect the antigen-binding portion of the CAR recognizes and binds an antigen within the extracellular domain of the CD123 protein. In one aspect, the CD123 protein is expressed on a cancer cell. In an embodiment, the CD123 inhibitor is administered in combination with a CD19 inhibitor, e.g., a CD19 CAR-expressing cell, e.g., a CAR-expressing cell described herein, e.g., a cell expressing a CAR comprising an antibody binding domain that is murine, human, or humanized.

[0603] Design, function, and sequences of CD123 CAR-expressing cells, e.g., CD123 CARTs, and methods of using the same are described on line 10-24 on page 151 of International Application WO 2016/164731, filed Apr. 8, 2016, which is incorporated by reference in its entirety.

[0604] In some embodiments, a CD123 inhibitor includes an anti-CD123 CAR-expressing cell, e.g., CART, e.g., a cell expressing an anti-CD123 CAR construct or encoded by a CD123 binding CAR comprising a scFv, CDRs, or VH and VL chains. In another aspect, provided herein is a population of CAR-expressing cells, e.g., CART cells, comprising a mixture of cells expressing CD19 CARs and CD123 CARs.

### Other Inhibitors

[0605] ROR1 inhibitors, anti-ROR1 CAR-expressing cells, and methods of using the same are described on pages 51-53, and 146-149 of International Application WO 2016/164731, filed Apr. 8, 2016, which is incorporated by reference in its entirety.

[0606] CD10 inhibitors, anti-CD10 CAR-expressing cells, and methods of using the same are described on pages 56-57, and 151-154 of International Application WO 2016/164731, filed Apr. 8, 2016, which is incorporated by reference in its entirety.

[0607] CD34 inhibitors, anti-CD34 CAR-expressing cells, and methods of using the same are described on page 57, and 154-156 of International Application WO 2016/164731, filed Apr. 8, 2016, which is incorporated by reference in its entirety.

[0608] FLT3 inhibitors, anti-FLT3 CAR-expressing cells, and methods of using the same are described on page 57, and 156-161 of International Application WO 2016/164731, filed Apr. 8, 2016, which is incorporated by reference in its entirety.

[0609] CD79b inhibitors, anti-CD79b CAR-expressing cells, and methods of using the same are described on page 58, and 161-163 of International Application WO 2016/164731, filed Apr. 8, 2016, which is incorporated by reference in its entirety.

[0610] CD179b inhibitors, anti-CD179b CAR-expressing cells, and methods of using the same are described on page 58, and 163-165 of International Application WO 2016/164731, filed Apr. 8, 2016, which is incorporated by reference in its entirety.

[0611] CD79a inhibitors, anti-CD79a CAR-expressing cells, and methods of using the same are described on page 59, and 165-166 of International Application WO 2016/164731, filed Apr. 8, 2016, which is incorporated by reference in its entirety.

[0612] In an embodiment, the B-cell inhibitor comprises an inhibitor of one or more of CD10, CD19, CD20, CD22, CD34, FLT-3, or ROR1. In an embodiment, the B-cell inhibitor comprises an effective number of one or more cells that express a CAR molecule that binds one or more of CD10, CD20, CD22, CD34, FLT-3, ROR1, CD79b, CD179b, or CD79a. In an embodiment, the B-cell inhibitor comprises a CD123 CAR. In an embodiment, the B cell inhibitor comprises one or more cells that express a CAR molecule that binds CD123. In an embodiment, the disease is a CD19-negative cancer, e.g., a CD19-negative relapsed cancer. In an embodiment, the CD19 CAR-expressing cell is administered simultaneously with, before, or after the one or more B-cell inhibitor.

[0613] In some aspects, the disclosure provides a method of treating a patient who is a non-responder, partial responder, or relapser to a CD19 inhibitor, e.g., a CD19 CAR therapy, comprising administering to the patient a B-cell inhibitor, e.g., a B-cell inhibitor as described herein, e.g., an inhibitor of one or more of (e.g., 2, 3, 4, 5, 6, 7, 8, 9, or all of) CD10, CD20, CD22, CD34, CD123, FLT-3, ROR1, CD79b, CD179b, or CD79a. In embodiments, the B-cell inhibitor is a CAR-expressing cell (e.g., T cell or NK cell) that is an inhibitor of one or more of (e.g., 2, 3, 4, 5, 6, or all of) CD10, CD20, CD22, CD34, CD123, FLT-3, or ROR1. In embodiments, the patient has, or is identified as having, a CD19-negative cancer cell and a cancer cell that is positive for one or more of (e.g., 2, 3, 4, 5, 6, 7, 8, 9, or all of) CD10, CD20, CD22, CD34, CD123, FLT-3, ROR1, CD79b, CD179b, or CD79a.

[0614] In embodiments, the method further comprises administering to the patient a B-cell inhibitor for which the cancer cell is positive, e.g., an inhibitor of one or more of (e.g., 2, 3, 4, 5, 6, 7, 8, 9, or all of) the CD10, CD20, CD22, CD34, CD123, FLT-3, ROR1, CD79b, CD179b, or CD79a for which the cancer cell is positive. In embodiments, the method further comprises one or both of a step of determining whether the patient comprises a CD19-negative cancer cell, and a step of determining whether the patient comprises a cancer cell that is positive for one or more of (e.g., 2, 3, 4, 5, 6, 7, 8, 9, or all of) CD10, CD20, CD22, CD34, CD123, FLT-3, ROR1, CD79b, CD179b, or CD79a. In embodiments, the subject has or is identified as having a population of tumor or cancer cells that test negative for CD19 expression as measured by binding to an anti-CD19 antibody, e.g., an antibody with the same specificity as any of the CAR molecules in Table 2 or Table 3.

### CAR Therapies

[0615] CAR antigen binding domains, nucleic acid constructs comprising CAR molecules, functional features thereof, and CAR-expressing cells are described in International Application WO 2016/164731, filed Apr. 8, 2016, which is incorporated by reference in its entirety.

[0616] The inhibitors herein, e.g., CAR-expressing cells directed against CD10, CD20, CD22, CD34, CD123, FLT-3, ROR1, CD79b, CD179b, or CD79a, may comprise one or more of the compositions described herein, e.g., a transmembrane domain, intracellular signaling domain, costimulatory domain, leader sequence, or hinge.

[0617] In one aspect, the present invention encompasses a recombinant nucleic acid construct comprising a transgene encoding a CAR. In some embodiments, the nucleic acid molecule comprises a nucleic acid sequence encoding an anti-CD19 binding domain selected from one or more of SEQ ID NOS:61-72, wherein the sequence is contiguous with and in the same reading frame as the nucleic acid sequence encoding an intracellular signaling domain. An exemplary intracellular signaling domain that can be used in the CAR includes, but is not limited to, one or more intracellular signaling domains of, e.g., CD3-zeta, CD28, 4-1BB, and the like. In some instances, the CAR can comprise any combination of CD3-zeta, CD28, 4-1BB, and the like.

[0618] In one aspect, the present invention contemplates modifications of the starting antibody or fragment (e.g., scFv) amino acid sequence that generate functionally equivalent molecules. For example, the VH or VL of an antigen binding domain, e.g., scFv, comprised in the CAR can be modified to retain at least about 70%, 71%, 72%, 73%, 74%, 75%, 76%, 77%, 78%, 79%, 80%,81%, 82%, 83%, 84%, 85%, 86%, 87%, 88%, 89%, 90%, 91%, 92%, 93%, 94%, 95%, 96%, 97%, 98%, 99% identity of the starting VH or VL framework region of the antigen binding domain, e.g., scFv. The present invention contemplates modifications of the entire CAR construct, e.g., modifications in one or more amino acid sequences of the various domains of the CAR construct in order to generate functionally equivalent molecules. The CAR construct can be modified to retain at least about 70%, 71%, 72%, 73%, 74%, 75%, 76%, 77%, 78%, 79%, 80%, 81%, 82%, 83%, 84%, 85%, 86%, 87%, 88%, 89%, 90%, 91%, 92%, 93%, 94%, 95%, 96%, 97%, 98%, 99% identity of the starting CAR construct. The present invention also contemplates modifications of CDRs, e.g., modifications in one or more amino acid sequences of one or more CDRs of a CAR construct in order to generate functionally equivalent molecules. For instance, the CDR may have, e.g., up to and including 1, 2, 3, 4, 5, or 6 alterations (e.g., substitutions) relative to a CDR sequence provided herein.

[0619] The nucleic acid sequences coding for the desired molecules can be obtained using recombinant methods known in the art, such as, for example by screening libraries from cells expressing the gene, by deriving the gene from a vector known to include the same, or by isolating directly from cells and tissues containing the same, using standard techniques. Alternatively, the nucleic acid of interest can be produced synthetically, rather than cloned.

[0620] The present invention includes, among other things, retroviral and lentiviral vector constructs expressing a CAR that can be directly transduced into a cell.

[0621] The present invention also includes an RNA construct that can be directly transfected into a cell. A method for generating mRNA for use in transfection involves in vitro transcription (IVT) of a template with specially designed primers, followed by polyA addition, to produce a construct containing 3′ and 5′ untranslated sequence (“UTR”), a 5′ cap and/or Internal Ribosome Entry Site (IRES), the nucleic acid to be expressed, and a polyA tail, typically 50-2000 bases in length (SEQ ID NO:118). RNA so produced can efficiently transfect different kinds of cells. In one embodiment, the template includes sequences for the CAR. In an embodiment, an RNA CAR vector is transduced into a T cell by electroporation.

### Antigen Binding Domain

[0622] In one aspect, the CAR of the invention comprises a target-specific binding element otherwise referred to as an antigen binding domain. The choice of moiety depends upon the type and number of ligands that define the surface of a target cell. For example, the antigen binding domain may be chosen to recognize a ligand that acts as a cell surface marker on target cells associated with a particular disease state. Thus examples of cell surface markers that may act as ligands for the antigen binding domain in a CAR of the invention include those associated with viral, bacterial and parasitic infections, autoimmune disease and cancer cells. The antigen-binding domain can bind, e.g., one or more of CD19 or BCMA.

[0623] In one aspect, the CAR-mediated T-cell response can be directed to an antigen of interest by way of engineering an antigen binding domain that specifically binds a desired antigen into the CAR.

[0624] The antigen binding domain (e.g., an antigen-binding domain that binds one or more of CD19 or BCMA) can be any domain that binds to the antigen including but not limited to a monoclonal antibody, a polyclonal antibody, a recombinant antibody, a murine antibody, a human antibody, a humanized antibody, and a functional fragment thereof, including but not limited to a single-domain antibody such as a heavy chain variable domain (VH), a light chain variable domain (VL) and a variable domain (VHH) of camelid derived nanobody, and to an alternative scaffold known in the art to function as antigen binding domain, such as a recombinant fibronectin domain, and the like.

[0625] In some instances, it is beneficial for the antigen binding domain to be derived from the same species in which the CAR will ultimately be used in. For example, for use in humans, it may be beneficial for the antigen binding domain of the CAR to comprise human or humanized residues for the antigen binding domain of an antibody or antibody fragment.

[0626] A humanized antibody can be produced using a variety of techniques known in the art, including but not limited to, CDR-grafting (see, e.g., European Patent No. EP 239,400; International Publication No. WO 91/09967; and U.S. Pat. Nos. 5,225,539, 5,530,101, and 5,585,089, each of which is incorporated herein in its entirety by reference), veneering or resurfacing (see, e.g., European Patent Nos. EP 592,106 and EP 519,596; Padlan, 1991, Molecular Immunology, 28(4/5):489-498; Studnicka et al., 1994, Protein Engineering, 7(6):805-814; and Roguska et al., 1994, PNAS, 91:969-973, each of which is incorporated herein by its entirety by reference), chain shuffling (see, e.g., U.S. Pat. No. 5,565,332, which is incorporated herein in its entirety by reference), and techniques disclosed in, e.g., U.S. Patent Application Publication No. US2005/0042664, U.S. Patent Application Publication No. US2005/0048617, U.S. Pat. Nos. 6,407,213, 5,766,886, International Publication No. WO 9317105, Tan et al., J. Immunol., 169:1119-25 (2002), Caldas et al., Protein Eng., 13(5):353-60 (2000), Morea et al., Methods, 20(3):267-79 (2000), Baca et al., J. Biol. Chem., 272(16):10678-84 (1997), Roguska et al., Protein Eng., 9(10):895-904 (1996), Couto et al., Cancer Res., 55 (23 Supp):5973s-5977s (1995), Couto et al., Cancer Res., 55(8):1717-22 (1995), Sandhu J S, Gene, 150(2):409-10 (1994), and Pedersen et al., J. Mol. Biol., 235(3):959-73 (1994), each of which is incorporated herein in its entirety by reference.

[0627] A humanized antibody or antibody fragment has one or more amino acid residues remaining in it from a source which is nonhuman. These nonhuman amino acid residues are often referred to as “import” residues, which are typically taken from an “import” variable domain. As provided herein, humanized antibodies or antibody fragments comprise one or more CDRs from nonhuman immunoglobulin molecules and framework regions wherein the amino acid residues comprising the framework are derived completely or mostly from human germline. Multiple techniques for humanization of antibodies or antibody fragments are well-known in the art and can essentially be performed following the method of Winter and co-workers (Jones et al., Nature, 321:522-525 (1986); Riechmann et al., Nature, 332:323-327 (1988); Verhoeyen et al., Science, 239:1534-1536 (1988)), by substituting rodent CDRs or CDR sequences for the corresponding sequences of a human antibody, i.e., CDR-grafting (EP 239,400; PCT Publication No. WO 91/09967; and U.S. Pat. Nos. 4,816,567; 6,331,415; 5,225,539; 5,530,101; 5,585,089; 6,548,640, the contents of which are incorporated herein by reference herein in their entirety). In such humanized antibodies and antibody fragments, substantially less than an intact human variable domain has been substituted by the corresponding sequence from a nonhuman species. Humanized antibodies are often human antibodies in which some CDR residues and possibly some framework (FR) residues are substituted by residues from analogous sites in rodent antibodies. Humanization of antibodies and antibody fragments can also be achieved by veneering or resurfacing (EP 592,106; EP 519,596; Padlan, 1991, Molecular Immunology, 28(4/5):489-498; Studnicka et al., Protein Engineering, 7(6):805-814 (1994); and Roguska et al., PNAS, 91:969-973 (1994)) or chain shuffling (U.S. Pat. No. 5,565,332), the contents of which are incorporated herein by reference herein in their entirety.

[0628] The choice of human variable domains, both light and heavy, to be used in making the humanized antibodies is to reduce antigenicity. According to the so-called “best-fit” method, the sequence of the variable domain of a rodent antibody is screened against the entire library of known human variable-domain sequences. The human sequence which is closest to that of the rodent is then accepted as the human framework (FR) for the humanized antibody (Sims et al., J. Immunol., 151:2296 (1993); Chothia et al., J. Mol. Biol., 196:901 (1987), the contents of which are incorporated herein by reference herein in their entirety). Another method uses a particular framework derived from the consensus sequence of all human antibodies of a particular subgroup of light or heavy chains. The same framework may be used for several different humanized antibodies (see, e.g., Nicholson et al. Mol. Immun. 34 (16-17): 1157-1165 (1997); Carter et al., Proc. Natl. Acad. Sci. USA, 89:4285 (1992); Presta et al., J. Immunol., 151:2623 (1993), the contents of which are incorporated herein by reference herein in their entirety). In some embodiments, the framework region, e.g., all four framework regions, of the heavy chain variable region are derived from a VH4_4-59 germline sequence. In one embodiment, the framework region can comprise, one, two, three, four or five modifications, e.g., substitutions, e.g., from the amino acid at the corresponding murine sequence (e.g., of SEQ ID NO:59). In one embodiment, the framework region, e.g., all four framework regions of the light chain variable region are derived from a VK3_1.25 germline sequence. In one embodiment, the framework region can comprise, one, two, three, four or five modifications, e.g., substitutions, e.g., from the amino acid at the corresponding murine sequence (e.g., of SEQ ID NO:59).

[0629] In some aspects, the portion of a CAR composition of the invention that comprises an antibody fragment is humanized with retention of high affinity for the target antigen and other favorable biological properties. According to one aspect of the invention, humanized antibodies and antibody fragments are prepared by a process of analysis of the parental sequences and various conceptual humanized products using three-dimensional models of the parental and humanized sequences. Three-dimensional immunoglobulin models are commonly available and are familiar to those skilled in the art. Computer programs are available which illustrate and display probable three-dimensional conformational structures of selected candidate immunoglobulin sequences. Inspection of these displays permits analysis of the likely role of the residues in the functioning of the candidate immunoglobulin sequence, e.g., the analysis of residues that influence the ability of the candidate immunoglobulin to bind the target antigen. In this way, FR residues can be selected and combined from the recipient and import sequences so that the desired antibody or antibody fragment characteristic, such as increased affinity for the target antigen, is achieved. In general, the CDR residues are directly and most substantially involved in influencing antigen binding.

[0630] A humanized antibody or antibody fragment may retain a similar antigenic specificity as the original antibody, e.g., in the present invention, the ability to bind human CD19, CD20, or CD22. In some embodiments, a humanized antibody or antibody fragment may have improved affinity and/or specificity of binding to human CD19, CD20, or CD22.

[0631] In one aspect, the binding domain (e.g., an antigen-binding domain that binds one or more of CD10, CD19, CD20, CD22, CD34, CD123, FLT-3, ROR1, CD79b, CD179b, CD79a, or BCMA) is a fragment, e.g., a single chain variable fragment (scFv). In one aspect, the binding domain is a Fv, a Fab, a (Fab′)2, or a bi-functional (e.g. bi-specific) hybrid antibody (e.g., Lanzavecchia et al., Eur. J. Immunol. 17, 105 (1987)). In one aspect, the antibodies and fragments thereof of the invention binds a CD19, CD20, or CD22 protein with wild-type or enhanced affinity.

[0632] In some instances, scFvs can be prepared according to method known in the art (see, for example, Bird et al., (1988) Science 242:423-426 and Huston et al., (1988) Proc. Natl. Acad. Sci. USA 85:5879-5883). ScFv molecules can be produced by linking VH and VL regions together using flexible polypeptide linkers. The scFv molecules comprise a linker (e.g., a Ser-Gly linker) with an optimized length and/or amino acid composition. The linker length can greatly affect how the variable regions of a scFv fold and interact. In fact, if a short polypeptide linker is employed (e.g., between 5-10 amino acids) intrachain folding is prevented. Interchain folding is also required to bring the two variable regions together to form a functional epitope binding site. For examples of linker orientation and size see, e.g., Hollinger et al. 1993 Proc Natl Acad. Sci. U.S.A. 90:6444-6448, U.S. Patent Application Publication Nos. 2005/0100543, 2005/0175606, 2007/0014794, and PCT publication Nos. WO2006/020258 and WO2007/024715, is incorporated herein by reference.

[0633] An scFv can comprise a linker of at least 1, 2, 3, 4, 5, 6, 7, 8, 9, 10, 11, 12, 13, 14, 15, 16, 17, 18, 19, 20, 25, 30, 35, 40, 45, 50, or more amino acid residues between its VL and VH regions. The linker sequence may comprise any naturally occurring amino acid. In some embodiments, the linker sequence comprises amino acids glycine and serine. In another embodiment, the linker sequence comprises sets of glycine and serine repeats such as (Gly₄Ser)n, where n is a positive integer equal to or greater than 1 (SEQ ID NO:18). In one embodiment, the linker can be (Gly₄Ser)₄ (SEQ ID NO:106) or (Gly₄Ser)₃(SEQ ID NO:107). Variation in the linker length may retain or enhance activity, giving rise to superior efficacy in activity studies.

[0634] In some embodiments, the amino acid sequence of the antigen binding domain (e.g., an antigen-binding domain that binds one or more of CD10, CD19, CD20, CD22, CD34, CD123, FLT-3, ROR1, CD79b, CD179b, or CD79a) or other portions or the entire CAR) can be modified, e.g., an amino acid sequence described herein can be modified, e.g., by a conservative substitution. Families of amino acid residues having similar side chains have been defined in the art, including basic side chains (e.g., lysine, arginine, histidine), acidic side chains (e.g., aspartic acid, glutamic acid), uncharged polar side chains (e.g., glycine, asparagine, glutamine, serine, threonine, tyrosine, cysteine), nonpolar side chains (e.g., alanine, valine, leucine, isoleucine, proline, phenylalanine, methionine, tryptophan), beta-branched side chains (e.g., threonine, valine, isoleucine) and aromatic side chains (e.g., tyrosine, phenylalanine, tryptophan, histidine).

[0635] Percent identity in the context of two or more nucleic acids or polypeptide sequences, refers to two or more sequences that are the same. Two sequences are “substantially identical” if two sequences have a specified percentage of amino acid residues or nucleotides that are the same (e.g., 60% identity, optionally 70%, 71%, 72%, 73%, 74%, 75%, 76%, 77%, 78%, 79%, 80%,81%, 82%, 83%, 84%, 85%, 86%, 87%, 88%, 89%, 90%, 91%, 92%, 93%, 94%, 95%, 96%, 97%, 98%, 99% identity over a specified region, or, when not specified, over the entire sequence), when compared and aligned for maximum correspondence over a comparison window, or designated region as measured using one of the following sequence comparison algorithms or by manual alignment and visual inspection. Optionally, the identity exists over a region that is at least about 50 nucleotides (or 10 amino acids) in length, or over a region that is 100 to 500 or 1000 or more nucleotides (or 20, 50, 200 or more amino acids) in length.

[0636] For sequence comparison, typically one sequence acts as a reference sequence, to which test sequences are compared. When using a sequence comparison algorithm, test and reference sequences are entered into a computer, subsequence coordinates are designated, if necessary, and sequence algorithm program parameters are designated. Default program parameters can be used, or alternative parameters can be designated. The sequence comparison algorithm then calculates the percent sequence identities for the test sequences relative to the reference sequence, based on the program parameters. Methods of alignment of sequences for comparison are well known in the art. Optimal alignment of sequences for comparison can be conducted, e.g., by the local homology algorithm of Smith and Waterman, (1970) Adv. Appl. Math. 2:482c, by the homology alignment algorithm of Needleman and Wunsch, (1970) J. Mol. Biol. 48:443, by the search for similarity method of Pearson and Lipman, (1988) Proc. Nat'l. Acad. Sci. USA 85:2444, by computerized implementations of these algorithms (GAP, BESTFIT, FASTA, and TFASTA in the Wisconsin Genetics Software Package, Genetics Computer Group, 575 Science Dr., Madison, WI), or by manual alignment and visual inspection (see, e.g., Brent et al., (2003) Current Protocols in Molecular Biology).

[0637] Two examples of algorithms that are suitable for determining percent sequence identity and sequence similarity are the BLAST and BLAST 2.0 algorithms, which are described in Altschul et al., (1977) Nuc. Acids Res. 25:3389-3402; and Altschul et al., (1990) J. Mol. Biol. 215:403-410, respectively. Software for performing BLAST analyses is publicly available through the National Center for Biotechnology Information.

[0638] The percent identity between two amino acid sequences can also be determined using the algorithm of E. Meyers and W. Miller, (1988) Comput. Appl. Biosci. 4:11-17) which has been incorporated into the ALIGN program (version 2.0), using a PAM120 weight residue table, a gap length penalty of 12 and a gap penalty of 4. In addition, the percent identity between two amino acid sequences can be determined using the Needleman and Wunsch (1970) J. Mol. Biol. 48:444-453) algorithm which has been incorporated into the GAP program in the GCG software package (available at www.gcg.com), using either a Blossom 62 matrix or a PAM250 matrix, and a gap weight of 16, 14, 12, 10, 8, 6, or 4 and a length weight of 1, 2, 3, 4, 5, or 6.

[0639] In one aspect, the present invention contemplates modifications of the starting antibody or fragment (e.g., scFv) amino acid sequence that generate functionally equivalent molecules. For example, the VH or VL of a binding domain (e.g., an antigen-binding domain that binds one or more of CD10, CD19, CD20, CD22, CD34, CD123, FLT-3, ROR1, CD79b, CD179b, or CD79a), e.g., scFv, comprised in the CAR can be modified to retain at least about 70%, 71%, 72%, 73%, 74%, 75%, 76%, 77%, 78%, 79%, 80%,81%, 82%, 83%, 84%, 85%, 86%, 87%, 88%, 89%, 90%, 91%, 92%, 93%, 94%, 95%, 96%, 97%, 98%, 99% identity of the starting VH or VL framework region of the anti-CD19 binding domain, e.g., scFv. More broadly, the VH or VL of a B-cell antigen binding domain, to CD10, CD20, CD22, CD34, CD123, FLT-3, or ROR1, e.g., scFv, comprised in the CAR can be modified to retain at least about 70%, 71%, 72%, 73%, 74%, 75%, 76%, 77%, 78%, 79%, 80%,81%, 82%, 83%, 84%, 85%, 86%, 87%, 88%, 89%, 90%, 91%, 92%, 93%, 94%, 95%, 96%, 97%, 98%, 99% identity of the starting VH or VL framework region of the antigen binding domain, e.g., scFv. The present invention contemplates modifications of the entire CAR construct, e.g., modifications in one or more amino acid sequences of the various domains of the CAR construct in order to generate functionally equivalent molecules. The CAR construct can be modified to retain at least about 70%, 71%, 72%, 73%, 74%, 75%, 76%, 77%, 78%, 79%, 80%, 81%, 82%, 83%, 84%, 85%, 86%, 87%, 88%, 89%, 90%, 91%, 92%, 93%, 94%, 95%, 96%, 97%, 98%, 99% identity of the starting CAR construct.

### BISPECIFIC CARs

[0640] In an embodiment a multispecific antibody molecule is a bispecific antibody molecule. A bispecific antibody has specificity for no more than two antigens. A bispecific antibody molecule is characterized by a first immunoglobulin variable domain sequence which has binding specificity for a first epitope and a second immunoglobulin variable domain sequence that has binding specificity for a second epitope. In an embodiment the first and second epitopes are on the same antigen, e.g., the same protein (or subunit of a multimeric protein). In an embodiment the first and second epitopes overlap. In an embodiment the first and second epitopes do not overlap. In an embodiment the first and second epitopes are on different antigens, e.g., different proteins (or different subunits of a multimeric protein). In an embodiment a bispecific antibody molecule comprises a heavy chain variable domain sequence and a light chain variable domain sequence which have binding specificity for a first epitope and a heavy chain variable domain sequence and a light chain variable domain sequence which have binding specificity for a second epitope. In an embodiment a bispecific antibody molecule comprises a half antibody having binding specificity for a first epitope and a half antibody having binding specificity for a second epitope. In an embodiment a bispecific antibody molecule comprises a half antibody, or fragment thereof, having binding specificity for a first epitope and a half antibody, or fragment thereof, having binding specificity for a second epitope. In an embodiment a bispecific antibody molecule comprises a scFv, or fragment thereof, have binding specificity for a first epitope and a scFv, or fragment thereof, have binding specificity for a second epitope. In an embodiment the first epitope is located on CD19 and the second epitope is located on a second B cell antigen, e.g., CD10, CD20, CD22, CD34, CD123, FLT-3, or ROR1.

[0641] A bispecific antibody molecule (which can be, e.g., administered alone or as a portion of a CAR) can comprise two VH regions and two VL regions. In some embodiments, the upstream antibody or portion thereof (e.g. scFv) is arranged with its VH (VH₁) upstream of its VL (VL₁) and the downstream antibody or portion thereof (e.g. scFv) is arranged with its VL (VL₂) upstream of its VH (VH₂), such that the overall bispecific antibody molecule has the arrangement VH₁-VL₁-VL₂-VH₂. In other embodiments, the upstream antibody or portion thereof (e.g. scFv) is arranged with its VL (VL₁) upstream of its VH (VH₁) and the downstream antibody or portion thereof (e.g. scFv) is arranged with its VH (VH₂) upstream of its VL (VL₂), such that the overall bispecific antibody molecule has the arrangement VL₁-VH₁-VH₂-VL₂.

[0642] In certain embodiments, the antibody molecule is a multi-specific (e.g., a bispecific or a trispecific) antibody molecule. Protocols for generating bispecific or heterodimeric antibody molecules are known in the art; including but not limited to, for example, the “knob in a hole” approach described in, e.g., U.S. Pat. No. 5,731,168; the electrostatic steering Fc pairing as described in, e.g., WO 09/089004, WO 06/106905 and WO 2010/129304; Strand Exchange Engineered Domains (SEED) heterodimer formation as described in, e.g., WO 07/110205; Fab arm exchange as described in, e.g., WO 08/119353, WO 2011/131746, and WO 2013/060867; double antibody conjugate, e.g., by antibody cross-linking to generate a bi-specific structure using a heterobifunctional reagent having an amine-reactive group and a sulfhydryl reactive group as described in, e.g., U.S. Pat. No. 4,433,059; bispecific antibody determinants generated by recombining half antibodies (heavy-light chain pairs or Fabs) from different antibodies through cycle of reduction and oxidation of disulfide bonds between the two heavy chains, as described in, e.g., U.S. Pat. No. 4,444,878; trifunctional antibodies, e.g., three Fab′ fragments cross-linked through sulfhdryl reactive groups, as described in, e.g., U.S. Pat. No. 5,273,743; biosynthetic binding proteins, e.g., pair of scFvs cross-linked through C-terminal tails preferably through disulfide or amine-reactive chemical cross-linking, as described in, e.g., U.S. Pat. No. 5,534,254; bifunctional antibodies, e.g., Fab fragments with different binding specificities dimerized through leucine zippers (e.g., c-fos and c-jun) that have replaced the constant domain, as described in, e.g., U.S. Pat. No. 5,582,996; bispecific and oligospecific mono- and oligovalent receptors, e.g., VH-CH1 regions of two antibodies (two Fab fragments) linked through a polypeptide spacer between the CH1 region of one antibody and the VH region of the other antibody typically with associated light chains, as described in, e.g., U.S. Pat. No. 5,591,828; bispecific DNA-antibody conjugates, e.g., crosslinking of antibodies or Fab fragments through a double stranded piece of DNA, as described in, e.g., U.S. Pat. No. 5,635,602; bispecific fusion proteins, e.g., an expression construct containing two scFvs with a hydrophilic helical peptide linker between them and a full constant region, as described in, e.g., U.S. Pat. No. 5,637,481; multivalent and multispecific binding proteins, e.g., dimer of polypeptides having first domain with binding region of Ig heavy chain variable region, and second domain with binding region of Ig light chain variable region, generally termed diabodies (higher order structures are also encompassed creating for bispecific, trispecific, or tetraspecific molecules, as described in, e.g., U.S. Pat. No. 5,837,242; minibody constructs with linked VL and VH chains further connected with peptide spacers to an antibody hinge region and CH3 region, which can be dimerized to form bispecific/multivalent molecules, as described in, e.g., U.S. Pat. No. 5,837,821; VH and VL domains linked with a short peptide linker (e.g., 5 or 10 amino acids) or no linker at all in either orientation, which can form dimers to form bispecific diabodies; trimers and tetramers, as described in, e.g., U.S. Pat. No. 5,844,094; String of VH domains (or VL domains in family members) connected by peptide linkages with crosslinkable groups at the C-terminus further associated with VL domains to form a series of FVs (or scFvs), as described in, e.g., U.S. Pat. No. 5,864,019; and single chain binding polypeptides with both a VH and a VL domain linked through a peptide linker are combined into multivalent structures through non-covalent or chemical crosslinking to form, e.g., homobivalent, heterobivalent, trivalent, and tetravalent structures using both scFV or diabody type format, as described in, e.g., U.S. Pat. No. 5,869,620. Additional exemplary multispecific and bispecific molecules and methods of making the same are found, for example, in U.S. Pat. Nos. 5,910,573, 5,932,448, 5,959,083, 5,989,830, 6,005,079, 6,239,259, 6,294,353, 6,333,396, 6,476,198, 6,511,663, 6,670,453, 6,743,896, 6,809,185, 6,833,441, 7,129,330, 7,183,076, 7,521,056, 7,527,787, 7,534,866, 7,612,181, US2002004587A1, US2002076406A1, US2002103345A1, US2003207346A1, US2003211078A1, US2004219643A1, US2004220388A1, US2004242847A1, US2005003403A1, US2005004352A1, US2005069552A1, US2005079170A1, US2005100543A1, US2005136049A1, US2005136051A1, US2005163782A1, US2005266425A1, US2006083747A1, US2006120960A1, US2006204493A1, US2006263367A1, US2007004909A1, US2007087381A1, US2007128150A1, US2007141049A1, US2007154901A1, US2007274985A1, US2008050370A1, US2008069820A1, US2008152645A1, US2008171855A1, US2008241884A1, US2008254512A1, US2008260738A1, US2009130106A1, US2009148905A1, US2009155275A1, US2009162359A1, US2009162360A1, US2009175851A1, US2009175867A1, US2009232811A1, US2009234105A1, US2009263392A1, US2009274649A1, EP346087A2, WO0006605A2, WO02072635A2, WO04081051A1, WO06020258A2, WO2007044887A2, WO2007095338A2, WO2007137760A2, WO2008119353A1, WO2009021754A2, WO2009068630A1, WO9103493A1, WO9323537A1, WO9409131A1, WO9412625A2, WO9509917A1, WO9637621A2, WO9964460A1. The contents of the above-referenced applications are incorporated herein by reference in their entireties.

[0643] Within each antibody or antibody fragment (e.g., scFv) of a bispecific antibody molecule, the VH can be upstream or downstream of the VL. In some embodiments, the upstream antibody or antibody fragment (e.g., scFv) is arranged with its VH (VH₁) upstream of its VL (VL₁) and the downstream antibody or antibody fragment (e.g., scFv) is arranged with its VL (VL₂) upstream of its VH (VH₂), such that the overall bispecific antibody molecule has the arrangement VH₁-VL₁-VL₂-VH₂. In other embodiments, the upstream antibody or antibody fragment (e.g., scFv) is arranged with its VL (VL₁) upstream of its VH (VH₁) and the downstream antibody or antibody fragment (e.g., scFv) is arranged with its VH (VH₂) upstream of its VL (VL₂), such that the overall bispecific antibody molecule has the arrangement VL₁-VH₁-VH₂-VL₂. Optionally, a linker is disposed between the two antibodies or antibody fragments (e.g., scFvs), e.g., between VL₁ and VL₂ if the construct is arranged as VH₁-VL₁-VL₂-VH₂, or between VH₁ and VH₂ if the construct is arranged as VL₁-VH₁-VH₂-VL₂. The linker may be a linker as described herein, e.g., a (Gly₄-Ser)n linker, wherein n is 1, 2, 3, 4, 5, or 6, e.g., 4 (SEQ ID NO: 53). In general, the linker between the two scFvs should be long enough to avoid mispairing between the domains of the two scFvs. Optionally, a linker is disposed between the VL and VH of the first scFv. Optionally, a linker is disposed between the VL and VH of the second scFv. In constructs that have multiple linkers, any two or more of the linkers can be the same or different. Accordingly, in some embodiments, a bispecific CAR comprises VLs, VHs, and optionally one or more linkers in an arrangement as described herein. In certain embodiments the antibody molecule is a bispecific antibody molecule having a first binding specificity for a first B-cell epitope and a second binding specificity for another B-cell antigen. For instance, in some embodiments the bispecific antibody molecule has a first binding specificity for CD19 and a second binding specificity for one or more of CD10, CD20, CD22, CD34, CD123, FLT-3, ROR1, CD79b, CD179b, or CD79a. In some embodiments the bispecific antibody molecule has a first binding specificity for CD19 and a second binding specificity for CD22. Exemplary bispecific CAR19/CAR22 antibody molecules and sequences thereof, are described on page 62 and pages 501-506 of International Application WO 2016/164731, filed Apr. 8, 2016, which is incorporated by reference in its entirety.

### CAR Compositions

[0644] Compositions comprising cells that express a CAR molecule, e.g., a composition comprising: (i) one or more cells that express a CAR molecule that binds CD19, e.g., a CAR molecule that binds CD19 described herein, e.g., a CD19 CAR, and (ii) a B-cell inhibitor, e.g., one or more inhibitors of CD10, CD20, CD22, CD34, CD123, FLT-3, or ROR1, are described on pages 15-17 of International Application WO 2016/164731, filed Apr. 8, 2016, which is incorporated by reference in its entirety.

[0645] In one embodiment, a method of administration of a composition described herein includes administering a population of cells, a plurality of which comprise a CAR molecule described herein. In some embodiments, the population of CAR-expressing cells comprises a mixture of cells expressing different CARs. For example, in one embodiment, the population of CAR-expressing cells can include a first cell expressing a CAR having an anti-CD19 binding domain described herein, and a second cell expressing a CAR having a different B-cell antigen binding domain. In embodiments, the first and second cell populations are T cells. In embodiments, the first and second populations of T cells are the same isotype, e.g., are both CD4+ T cells, or are both CD8+ T cells. In other embodiments, the first and second populations of T cells are different isotypes, e.g., the first population comprises CD4+ T cells and the second population comprises CD8+ T cells. In embodiments, the first and second populations of T cells are cell types described in WO2012/129514, which is herein incorporated by reference in its entirety.

[0646] As another example, a population of cells can comprise a single cell type that expresses both a CAR having an anti-CD19 binding domain described herein and a CAR having a different B-cell antigen binding domain. As another example, a population of cells can comprise a single cell type that expresses a CAR having two or more (e.g., 2, 3, 4, or 5) B-cell antigen binding domains, e.g., is a bispecific CAR, e.g., as described herein.

[0647] In an embodiment, when the first B-cell inhibitor is a CD19 CAR-expressing cell and the second B-cell inhibitor is a CD10 CAR-expressing cell, the first CAR and second CAR may be expressed by the same cell type or different types. In another embodiment, when the first B-cell inhibitor is a CD19 CAR-expressing cell and the second B-cell inhibitor is a CD20 CAR-expressing cell, the first CAR and second CAR may be expressed by the same cell type or different types. In yet another embodiment, when the first B-cell inhibitor is a CD19 CAR-expressing cell and the second B-cell inhibitor is a CD22 CAR-expressing cell, the first CAR and second CAR may be expressed by the same cell type or different types.

[0648] In an embodiment, when the first B-cell inhibitor is a CD19 CAR-expressing cell and the second B-cell inhibitor is a CD34 CAR-expressing cell, the first CAR and second CAR may be expressed by the same cell type or different types. In another embodiment, when the first B-cell inhibitor is a CD19 CAR-expressing cell and the second B-cell inhibitor is a CD123 CAR-expressing cell, the first CAR and second CAR may be expressed by the same cell type or different types. In yet another embodiment, when the first B-cell inhibitor is a CD19 CAR-expressing cell and the second B-cell inhibitor is a FLT-3 CAR-expressing cell, the first CAR and second CAR may be expressed by the same cell type or different types. In an embodiment, when the first B-cell inhibitor is a CD19 CAR-expressing cell and the second B-cell inhibitor is a ROR1 CAR-expressing cell, the first CAR and second CAR may be expressed by the same cell type or different types.

[0649] More generally, when the first B-cell inhibitor comprises a CD19 CAR and there is a second B-cell inhibitor e.g., which comprises a second CAR, the first CAR and the second B-cell inhibitor may be expressed by the same cell type or different types. Exemplary cell populations comprising cells expressing different CAR molecules, and methods of using the same are described on pages 23-32 of International Application WO 2016/164731, filed Apr. 8, 2016, which is incorporated by reference in its entirety.

[0650] In embodiments, the cell expresses an inhibitory molecule that comprises a first polypeptide that comprises at least a portion of an inhibitory molecule, associated with a second polypeptide that comprises a positive signal from an intracellular signaling domain. In embodiments, the inhibitory molecule comprise first polypeptide that comprises at least a portion of PD1 and a second polypeptide comprising a costimulatory domain and primary signaling domain.

### Chimeric TCR

[0651] In one aspect, the antibodies and antibody fragments disclosed herein (e.g., those directed against CD10, CD19, CD20, CD22, CD34, CD123, FLT-3, ROR1, CD79b, CD179b, or CD79a) can be grafted to one or more constant domain of a T cell receptor (“TCR”) chain, for example, a TCR alpha or TCR beta chain, to create an chimeric TCR that binds specifically to a cancer associated antigen. Without being bound by theory, it is believed that chimeric TCRs will signal through the TCR complex upon antigen binding. For example, an scFv as disclosed herein, can be grafted to the constant domain, e.g., at least a portion of the extracellular constant domain, the transmembrane domain and the cytoplasmic domain, of a TCR chain, for example, the TCR alpha chain and/or the TCR beta chain. As another example, an antibody fragment, for example a VL domain as described herein, can be grafted to the constant domain of a TCR alpha chain, and an antibody fragment, for example a VH domain as described herein, can be grafted to the constant domain of a TCR beta chain (or alternatively, a VL domain may be grafted to the constant domain of the TCR beta chain and a VH domain may be grafted to a TCR alpha chain). As another example, the CDRs of an antibody or antibody fragment, e.g., the CDRs of an antibody or antibody fragment as described in any of the Tables herein may be grafted into a TCR alpha and/or beta chain to create a chimeric TCR that binds specifically to a cancer associated antigen. For example, the LC CDRs disclosed herein may be grafted into the variable domain of a TCR alpha chain and the HC CDRs disclosed herein may be grafted to the variable domain of a TCR beta chain, or vice versa. Such chimeric TCRs may be produced by any appropriate method (For example, Willemsen R A et al, Gene Therapy 2000; 7: 1369-1377; Zhang T et al, Cancer Gene Ther 2004; 11: 487-496; Aggen et al, Gene Ther. 2012 April; 19(4):365-74).

### Non-Antibody Scaffolds

[0652] In embodiments, the antigen binding domain comprises a non antibody scaffold, e.g., a fibronectin, ankyrin, domain antibody, lipocalin, small modular immuno-pharmaceutical, maxybody, Protein A, or affilin. In embodiments, the antigen binding domain is a polypeptide or fragment thereof of a naturally occurring protein expressed on a cell. In some embodiments, the antigen binding domain comprises a non-antibody scaffold.

[0653] Non-antibody scaffolds include: fibronectin (Novartis, MA), ankyrin (Molecular Partners AG, Zurich, Switzerland), domain antibodies (Domantis, Ltd., Cambridge, MA, and Ablynx nv, Zwijnaarde, Belgium), lipocalin (Pieris Proteolab AG, Freising, Germany), small modular immuno-pharmaceuticals (Trubion Pharmaceuticals Inc., Seattle, WA), maxybodies (Avidia, Inc., Mountain View, CA), Protein A (Affibody AG, Sweden), and affilin (gamma-crystallin or ubiquitin) (Scil Proteins GmbH, Halle, Germany).

[0654] Additional and exemplary non-antibody scaffolds are described on pages 179-181 of International Application WO 2016/164731, filed Apr. 8, 2016, which is incorporated by reference in its entirety.

### Transmembrane Domain

[0655] With respect to the transmembrane domain, in various embodiments, a CAR can be designed to comprise a transmembrane domain that is attached to the extracellular domain of the CAR. A transmembrane domain can include one or more additional amino acids adjacent to the transmembrane region, e.g., one or more amino acid associated with the extracellular region of the protein from which the transmembrane was derived (e.g., 1, 2, 3, 4, 5, 6, 7, 8, 9, 10 up to 15 amino acids of the extracellular region) and/or one or more additional amino acids associated with the intracellular region of the protein from which the transmembrane protein is derived (e.g., 1, 2, 3, 4, 5, 6, 7, 8, 9, 10 up to 15 amino acids of the intracellular region). In one aspect, the transmembrane domain is one that is associated with one of the other domains of the CAR, e.g., in one embodiment, the transmembrane domain may be from the same protein that the signaling domain, costimulatory domain or the hinge domain is derived from. In another aspect, the transmembrane domain is not derived from the same protein that any other domain of the CAR is derived from. In some instances, the transmembrane domain can be selected or modified by amino acid substitution to avoid binding of such domains to the transmembrane domains of the same or different surface membrane proteins, e.g., to minimize interactions with other members of the receptor complex. In one aspect, the transmembrane domain is capable of homodimerization with another CAR on the cell surface of a CAR-expressing cell. In a different aspect the amino acid sequence of the transmembrane domain may be modified or substituted so as to minimize interactions with the binding domains of the native binding partner present in the same CAR-expressing cell.

[0656] The transmembrane domain may be derived either from a natural or from a recombinant source. Where the source is natural, the domain may be derived from any membrane-bound or transmembrane protein. In one aspect the transmembrane domain is capable of signaling to the intracellular domain(s) whenever the CAR has bound to a target. A transmembrane domain of particular use in this invention may include at least the transmembrane region(s) of e.g., the alpha, beta or zeta chain of the T-cell receptor, CD28, CD3 epsilon, CD45, CD4, CD5, CD8, CD9, CD16, CD22, CD33, CD37, CD64, CD80, CD86, CD134, CD137, CD154. In some embodiments, a transmembrane domain may include at least the transmembrane region(s) of, e.g., KIRDS2, OX40, CD2, CD27, LFA-1 (CD11a, CD18), ICOS (CD278), 4-1BB (CD137), GITR, CD40, BAFFR, HVEM (LIGHTR), SLAMF7, NKp80 (KLRF1), NKp44, NKp30, NKp46, CD160, CD19, IL2R beta, IL2R gamma, IL7R a, ITGA1, VLA1, CD49a, ITGA4, IA4, CD49D, ITGA6, VLA-6, CD49f, ITGAD, CD11d, ITGAE, CD103, ITGAL, CD11a, LFA-1, ITGAM, CD11b, ITGAX, CD11c, ITGB1, CD29, ITGB2, CD18, LFA-1, ITGB7, TNFR2, DNAM1 (CD226), SLAMF4 (CD244, 2B4), CD84, CD96 (Tactile), CEACAM1, CRTAM, Ly9 (CD229), CD160 (BY55), PSGL1, CD100 (SEMA4D), SLAMF6 (NTB-A, Ly108), SLAM (SLAMF1, CD150, IPO-3), BLAME (SLAMF8), SELPLG (CD162), LTBR, PAG/Cbp, NKG2D, NKG2C, or CD19.

[0657] In some instances, the transmembrane domain can be attached to the extracellular region of the CAR, e.g., the antigen binding domain of the CAR, via a hinge, e.g., a hinge from a human protein. For example, in one embodiment, the hinge can be a human Ig (immunoglobulin) hinge, e.g., an IgG4 hinge, an IgD hinge, a GS linker (e.g., a GS linker described herein), a KIR2DS2 hinge, or a CD8a hinge. In one embodiment, the hinge or spacer comprises (e.g., consists of) the amino acid sequence of SEQ ID NO:14. In one aspect, the transmembrane domain comprises (e.g., consists of) a transmembrane domain of SEQ ID NO: 15.

[0658] In one aspect, the hinge or spacer comprises an IgG4 hinge. For example, in one embodiment, the hinge or spacer comprises a hinge of the amino acid sequence ESKYGPPCPPCPAPEFLGGPSVFLFPPKPKDTLMISRTPEVTCVVVDVSQEDPEVQFNW YVDGVEVHNAKTKPREEQFNSTYRVVSVLTVLHQDWLNGKEYKCKVSNKGLPSSIEK TISKAKGQPREPQVYTLPPSQEEMTKNQVSLTCLVKGFYPSDIAVEWESNGQPENNYK TTPPVLDSDGSFFLYSRLTVDKSRWQEGNVFSCSVMHEALHNHYTQKSLSLSLGKM (SEQ ID NO:45). In some embodiments, the hinge or spacer comprises a hinge encoded by a nucleotide sequence of

(SEQ ID NO: 46)
GAGAGCAAGTACGGCCCTCCCTGCCCCCCTTGCCCTGCCCCCGAGTTCC
TGGGCGGACCCAGCGTGTTCCTGTTCCCCCCCAAGCCCAAGGACACCCT
GATGATCAGCCGGACCCCCGAGGTGACCTGTGTGGTGGTGGACGTGTCC
CAGGAGGACCCCGAGGTCCAGTTCAACTGGTACGTGGACGGCGTGGAGG
TGCACAACGCCAAGACCAAGCCCCGGGAGGAGCAGTTCAATAGCACCTA
CCGGGTGGTGTCCGTGCTGACCGTGCTGCACCAGGACTGGCTGAACGGC
AAGGAATACAAGTGTAAGGTGTCCAACAAGGGCCTGCCCAGCAGCATCG
AGAAAACCATCAGCAAGGCCAAGGGCCAGCCTCGGGAGCCCCAGGTGTA
CACCCTGCCCCCTAGCCAAGAGGAGATGACCAAGAACCAGGTGTCCCTG
ACCTGCCTGGTGAAGGGCTTCTACCCCAGCGACATCGCCGTGGAGTGGG
AGAGCAACGGCCAGCCCGAGAACAACTACAAGACCACCCCCCCTGTGCT
GGACAGCGACGGCAGCTTCTTCCTGTACAGCCGGCTGACCGTGGACAAG
AGCCGGTGGCAGGAGGGCAACGTCTTTAGCTGCTCCGTGATGCACGAGG
CCCTGCACAACCACTACACCCAGAAGAGCCTGAGCCTGTCCCTGGGCAA
GATG.

[0659] In one aspect, the hinge or spacer comprises an IgD hinge. For example, in one embodiment, the hinge or spacer comprises a hinge of the amino acid sequence RWPESPKAQASSVPTAQPQAEGSLAKATTAPATTRNTGRGGEEKKKEKEKEEQEERET KTPECPSHTQPLGVYLLTPAVQDLWLRDKATFTCFVVGSDLKDAHLTWEVAGKVPTG GVEEGLLERHSNGSQSQHSRLTLPRSLWNAGTSVTCTLNHPSLPPQRLMALREPAAQA PVKLSLNLLASSDPPEAASWLLCEVSGFSPPNILLMWLEDQREVNTSGFAPARPPPQPG STTFWAWSVLRVPAPPSPQPATYTCVVSHEDSRTLLNASRSLEVSYVTDH (SEQ ID NO:47). In some embodiments, the hinge or spacer comprises a hinge encoded by a nucleotide sequence of

(SEQ ID NO: 48)
AGGTGGCCCGAAAGTCCCAAGGCCCAGGCATCTAGTGTTCCTACTGCAC
AGCCCCAGGCAGAAGGCAGCCTAGCCAAAGCTACTACTGCACCTGCCAC
TACGCGCAATACTGGCCGTGGCGGGGAGGAGAAGAAAAAGGAGAAAGAG
AAAGAAGAACAGGAAGAGAGGGAGACCAAGACCCCTGAATGTCCATCCC
ATACCCAGCCGCTGGGCGTCTATCTCTTGACTCCCGCAGTACAGGACTT
GTGGCTTAGAGATAAGGCCACCTTTACATGTTTCGTCGTGGGCTCTGAC
CTGAAGGATGCCCATTTGACTTGGGAGGTTGCCGGAAAGGTACCCACAG
GGGGGGTTGAGGAAGGGTTGCTGGAGCGCCATTCCAATGGCTCTCAGAG
CCAGCACTCAAGACTCACCCTTCCGAGATCCCTGTGGAACGCCGGGACC
TCTGTCACATGTACTCTAAATCATCCTAGCCTGCCCCCACAGCGTCTGA
TGGCCCTTAGAGAGCCAGCCGCCCAGGCACCAGTTAAGCTTAGCCTGAA
TCTGCTCGCCAGTAGTGATCCCCCAGAGGCCGCCAGCTGGCTCTTATGC
GAAGTGTCCGGCTTTAGCCCGCCCAACATCTTGCTCATGTGGCTGGAGG
ACCAGCGAGAAGTGAACACCAGCGGCTTCGCTCCAGCCCGGCCCCCACC
CCAGCCGGGTTCTACCACATTCTGGGCCTGGAGTGTCTTAAGGGTCCCA
GCACCACCTAGCCCCCAGCCAGCCACATACACCTGTGTTGTGTCCCATG
AAGATAGCAGGACCCTGCTAAATGCTTCTAGGAGTCTGGAGGTTTCCTA
CGTGACTGACCATT.

[0660] In one aspect, the transmembrane domain may be recombinant, in which case it will comprise predominantly hydrophobic residues such as leucine and valine. In one aspect a triplet of phenylalanine, tryptophan and valine can be found at each end of a recombinant transmembrane domain.

[0661] Optionally, a short oligo- or polypeptide linker, between 2 and 10 amino acids in length may form the linkage between the transmembrane domain and the cytoplasmic region of the CAR. A glycine-serine doublet provides a particularly suitable linker. For example, in one aspect, the linker comprises the amino acid sequence of GGGGSGGGGS (SEQ ID NO:49). In some embodiments, the linker is encoded by a nucleotide sequence of

(SEQ ID NO: 50)
GGTGGCGGAGGTTCTGGAGGTGGAGGTTCC.

[0662] In one aspect, the hinge or spacer comprises a KIR2DS2 hinge.

### Cytoplasmic Domain

[0663] The cytoplasmic domain or region of the CAR includes an intracellular signaling domain. An intracellular signaling domain is generally responsible for activation of at least one of the normal effector functions of the immune cell in which the CAR has been introduced.

[0664] Examples of intracellular signaling domains for use in the CAR of the invention include the cytoplasmic sequences of the T cell receptor (TCR) and co-receptors that act in concert to initiate signal transduction following antigen receptor engagement, as well as any derivative or variant of these sequences and any recombinant sequence that has the same functional capability.

[0665] It is known that signals generated through the TCR alone are insufficient for full activation of the T cell and that a secondary and/or costimulatory signal is also required. Thus, T cell activation can be said to be mediated by two distinct classes of cytoplasmic signaling sequences: those that initiate antigen-dependent primary activation through the TCR (primary intracellular signaling domains) and those that act in an antigen-independent manner to provide a secondary or costimulatory signal (secondary cytoplasmic domain, e.g., a costimulatory domain).

[0666] A primary signaling domain regulates primary activation of the TCR complex either in a stimulatory way, or in an inhibitory way. Primary intracellular signaling domains that act in a stimulatory manner may contain signaling motifs which are known as immunoreceptor tyrosine-based activation motifs or ITAMs.

[0667] Examples of ITAM containing primary intracellular signaling domains that are of particular use in the invention include those of CD3 zeta, common FcR gamma (FCER1G), Fc gamma RIIa, FcR beta (Fc Epsilon Rib), CD3 gamma, CD3 delta, CD3 epsilon, CD79a, CD79b, CD278 (also known as “ICOS”), FcεRI, DAP10, DAP12, and CD66d. In one embodiment, a CAR of the invention comprises an intracellular signaling domain, e.g., a primary signaling domain of CD3-zeta.

[0668] In one embodiment, a primary signaling domain comprises a modified ITAM domain, e.g., a mutated ITAM domain which has altered (e.g., increased or decreased) activity as compared to the native ITAM domain. In one embodiment, a primary signaling domain comprises a modified ITAM-containing primary intracellular signaling domain, e.g., an optimized and/or truncated ITAM-containing primary intracellular signaling domain. In an embodiment, a primary signaling domain comprises one, two, three, four or more ITAM motifs.

[0669] Further examples of molecules containing a primary intracellular signaling domain that are of particular use in the invention include those of DAP10, DAP12, and CD32.

### Costimulatory Signaling Domain

[0670] The intracellular signalling domain of the CAR can comprise the CD3-zeta signaling domain by itself or it can be combined with any other desired intracellular signaling domain(s) useful in the context of a CAR of the invention. For example, the intracellular signaling domain of the CAR can comprise a CD3 zeta chain portion and a costimulatory signaling domain. The costimulatory signaling domain refers to a portion of the CAR comprising the intracellular domain of a costimulatory molecule. In one embodiment, the intracellular domain is designed to comprise the signaling domain of CD3-zeta and the signaling domain of CD28. In one aspect, the intracellular domain is designed to comprise the signaling domain of CD3-zeta and the signaling domain of ICOS.

[0671] A costimulatory molecule can be a cell surface molecule other than an antigen receptor or its ligands that is required for an efficient response of lymphocytes to an antigen. Examples of such molecules include CD27, CD28, 4-1BB (CD137), OX40, CD30, CD40, PD1, ICOS, lymphocyte function-associated antigen-1 (LFA-1), CD2, CD7, LIGHT, NKG2C, B7-H3, and a ligand that specifically binds with CD83, and the like. For example, CD27 costimulation has been demonstrated to enhance expansion, effector function, and survival of human CART cells in vitro and augments human T cell persistence and antitumor activity in vivo (Song et al. Blood. 2012; 119(3):696-706). Further examples of such costimulatory molecules include MHC class I molecule, TNF receptor proteins, Immunoglobulin-like proteins, cytokine receptors, integrins, signaling lymphocytic activation molecules (SLAM proteins), activating NK cell receptors, BTLA, a Toll ligand receptor, OX40, CD2, CD7, CD27, CD28, CD30, CD40, CDS, ICAM-1, LFA-1 (CD11a/CD18), 4-1BB (CD137), B7-H3, CDS, ICAM-1, ICOS (CD278), GITR, BAFFR, LIGHT, HVEM (LIGHTR), KIRDS2, SLAMF7, NKp80 (KLRF1), NKp44, NKp30, NKp46, CD19, CD4, CD8alpha, CD8beta, IL2R beta, IL2R gamma, IL7R alpha, ITGA4, VLA1, CD49a, ITGA4, IA4, CD49D, ITGA6, VLA-6, CD49f, ITGAD, CD11d, ITGAE, CD103, ITGAL, CD11a, LFA-1, ITGAM, CD11b, ITGAX, CD11c, ITGB1, CD29, ITGB2, CD18, LFA-1, ITGB7, NKG2D, NKG2C, TNFR2, TRANCE/RANKL, DNAM1 (CD226), SLAMF4 (CD244, 2B4), CD84, CD96 (Tactile), CEACAM1, CRTAM, Ly9 (CD229), CD160 (BY55), PSGL1, CD100 (SEMA4D), CD69, SLAMF6 (NTB-A, Ly108), SLAM (SLAMF1, CD150, IPO-3), BLAME (SLAMF8), SELPLG (CD162), LTBR, LAT, GADS, SLP-76, PAG/Cbp, CD19a, and a ligand that specifically binds with CD83. The intracellular signaling sequences within the cytoplasmic portion of the CAR of the invention may be linked to each other in a random or specified order. Optionally, a short oligo- or polypeptide linker, for example, between 2 and 10 amino acids (e.g., 2, 3, 4, 5, 6, 7, 8, 9, or amino acids) in length may form the linkage between intracellular signaling sequence. In one embodiment, a glycine-serine doublet can be used as a suitable linker. In one embodiment, a single amino acid, e.g., an alanine, a glycine, can be used as a suitable linker.

[0672] In one aspect, the intracellular signaling domain is designed to comprise two or more, e.g., 2, 3, 4, 5, or more, costimulatory signaling domains. In an embodiment, the two or more, e.g., 2, 3, 4, 5, or more, costimulatory signaling domains, are separated by a linker molecule, e.g., a linker molecule described herein. In one embodiment, the intracellular signaling domain comprises two costimulatory signaling domains. In some embodiments, the linker molecule is a glycine residue. In some embodiments, the linker is an alanine residue.

[0673] In one aspect, the intracellular signaling domain is designed to comprise the signaling domain of CD3-zeta and the signaling domain of CD28. In one aspect, the intracellular signaling domain is designed to comprise the signaling domain of CD3-zeta and the signaling domain of 4-1BB. In one aspect, the signaling domain of 4-1BB is a signaling domain of SEQ ID NO: 16. In one aspect, the signaling domain of CD3-zeta is a signaling domain of SEQ ID NO: 17.

[0674] In one aspect, the intracellular signaling domain is designed to comprise the signaling domain of CD3-zeta and the signaling domain of CD27. In one aspect, the signaling domain of CD27 comprises an amino acid sequence of

(SEQ ID NO: 51)
QRRKYRSNKGESPVEPAEPCRYSCPREEEGSTIPIQEDYRKPEPACSP.

In one aspect, the signalling domain of CD27 is encoded by a nucleic acid sequence of

(SEQ ID NO: 52)
AGGAGTAAGAGGAGCAGGCTCCTGCACAGTGACTACATGAACATGACTCC
CCGCCGCCCCGGGCCCACCCGCAAGCATTACCAGCCCTATGCCCCACCAC
GCGACTTCGCAGCCTATCGCTCC.

### Natural Killer Cell Receptor (NKR) CARs

[0675] In an embodiment, a CAR molecule described herein comprises one or more components of a natural killer cell receptor (NKR), thereby forming an NKR-CAR. The NKR component can be a transmembrane domain, a hinge domain, or a cytoplasmic domain from any of the following natural killer cell receptors: killer cell immunoglobulin-like receptor (KIR), e.g., KIR2DL1, KIR2DL2/L3, KIR2DL4, KIR2DL5A, KIR2DL5B, KIR2DS1, KIR2DS2, KIR2DS3, KIR2DS4, DIR2DS5, KIR3DL1/S1, KIR3DL2, KIR3DL3, KIR2DP1, and KIR3DP1; natural cytotoxicity receptor (NCR), e.g., NKp30, NKp44, NKp46; signaling lymphocyte activation molecule (SLAM) family of immune cell receptors, e.g., CD48, CD229, 2B4, CD84, NTB-A, CRACC, BLAME, and CD2F-10; Fc receptor (FcR), e.g., CD16, and CD64; and Ly49 receptors, e.g., LY49A, LY49C. The NKR-CAR molecules described herein may interact with an adaptor molecule or intracellular signaling domain, e.g., DAP12. Exemplary configurations and sequences of CAR molecules comprising NKR components are described in International Publication No. WO2014/145252, the contents of which are hereby incorporated by reference.

### Strategies for Regulating Chimeric Antigen Receptors

[0676] In some embodiments, a regulatable CAR (RCAR) where the CAR activity can be controlled is desirable to optimize the safety and efficacy of a CAR therapy. There are many ways CAR activities can be regulated. For example, inducing apoptosis using, e.g., a caspase fused to a dimerization domain (see, e.g., Di et al., N Engl. J. Med. 2011 Nov. 3; 365(18):1673-1683), can be used as a safety switch in the CAR therapy of the instant invention. In one embodiment, the cells (e.g., T cells or NK cells) expressing a CAR of the present invention further comprise an inducible apoptosis switch, wherein a human caspase (e.g., caspase 9) or a modified version is fused to a modification of the human FKB protein that allows conditional dimerization. In the presence of a small molecule, such as a rapalog (e.g., AP 1903, AP20187), the inducible caspase (e.g., caspase 9) is activated and leads to the rapid apoptosis and death of the cells (e.g., T cells or NK cells) expressing a CAR of the present invention. Examples of a caspase-based inducible apoptosis switch (or one or more aspects of such a switch) have been described in, e.g., US2004040047; US20110286980; US20140255360; WO1997031899; WO2014151960; WO2014164348; WO2014197638; WO2014197638; all of which are incorporated by reference herein.

[0677] In another example, CAR-expressing cells can also express an inducible Caspase-9 (iCaspase-9) molecule that, upon administration of a dimerizer drug (e.g., rimiducid (also called AP1903 (Bellicum Pharmaceuticals) or AP20187 (Ariad)) leads to activation of the Caspase-9 and apoptosis of the cells. The iCaspase-9 molecule contains a chemical inducer of dimerization (CID) binding domain that mediates dimerization in the presence of a CID. This results in inducible and selective depletion of CAR-expressing cells. In some cases, the iCaspase-9 molecule is encoded by a nucleic acid molecule separate from the CAR-encoding vector(s). In some cases, the iCaspase-9 molecule is encoded by the same nucleic acid molecule as the CAR-encoding vector. The iCaspase-9 can provide a safety switch to avoid any toxicity of CAR-expressing cells. See, e.g., Song et al. Cancer Gene Ther. 2008; 15(10):667-75; Clinical Trial Id. No. NCT02107963; and Di Stasi et al. N. Engl. J. Med. 2011; 365:1673-83.

[0678] Alternative strategies for regulating the CAR therapy of the instant invention include utilizing small molecules or antibodies that deactivate or turn off CAR activity, e.g., by deleting CAR-expressing cells, e.g., by inducing antibody dependent cell-mediated cytotoxicity (ADCC). For example, CAR-expressing cells described herein may also express an antigen that is recognized by molecules capable of inducing cell death, e.g., ADCC or complement-induced cell death. For example, CAR expressing cells described herein may also express a receptor capable of being targeted by an antibody or antibody fragment. Examples of such receptors include EpCAM, VEGFR, integrins (e.g., integrins αvβ3, α4, αI¾β3, α4β7, α5β1, αvβ3, αv), members of the TNF receptor superfamily (e.g., TRAIL-R1, TRAIL-R2), PDGF Receptor, interferon receptor, folate receptor, GPNMB, ICAM-1, HLA-DR, CEA, CA-125, MUC1, TAG-72, IL-6 receptor, 5T4, GD2, GD3, CD2, CD3, CD4, CD5, CD11, CD11a/LFA-1, CD15, CD18/ITGB2, CD19, CD20, CD22, CD23/lgE Receptor, CD25, CD28, CD30, CD33, CD38, CD40, CD41, CD44, CD51, CD52, CD62L, CD74, CD80, CD125, CD147/basigin, CD152/CTLA-4, CD154/CD40L, CD195/CCR5, CD319/SLAMF7, and EGFR, and truncated versions thereof (e.g., versions preserving one or more extracellular epitopes but lacking one or more regions within the cytoplasmic domain).

[0679] For example, a CAR-expressing cell described herein may also express a truncated epidermal growth factor receptor (EGFR) which lacks signaling capacity but retains the epitope that is recognized by molecules capable of inducing ADCC, e.g., cetuximab (ERBITUX®), such that administration of cetuximab induces ADCC and subsequent depletion of the CAR-expressing cells (see, e.g., WO2011/056894, and Jonnalagadda et al., Gene Ther. 2013; 20(8)853-860). Another strategy includes expressing a highly compact marker/suicide gene that combines target epitopes from both CD32 and CD20 antigens in the CAR-expressing cells described herein, which binds rituximab, resulting in selective depletion of the CAR-expressing cells, e.g., by ADCC (see, e.g., Philip et al., Blood. 2014; 124(8)1277-1287). Other methods for depleting CAR-expressing cells described herein include administration of CAMPATH, a monoclonal anti-CD52 antibody that selectively binds and targets mature lymphocytes, e.g., CAR-expressing cells, for destruction, e.g., by inducing ADCC. In other embodiments, the CAR-expressing cell can be selectively targeted using a CAR ligand, e.g., an anti-idiotypic antibody. In some embodiments, the anti-idiotypic antibody can cause effector cell activity, e.g., ADCC or ADC activities, thereby reducing the number of CAR-expressing cells. In other embodiments, the CAR ligand, e.g., the anti-idiotypic antibody, can be coupled to an agent that induces cell killing, e.g., a toxin, thereby reducing the number of CAR-expressing cells. Alternatively, the CAR molecules themselves can be configured such that the activity can be regulated, e.g., turned on and off, as described below.

[0680] In other embodiments, a CAR-expressing cell described herein may also express a target protein recognized by the T cell depleting agent. In one embodiment, the target protein is CD20 and the T cell depleting agent is an anti-CD20 antibody, e.g., rituximab. In such embodiment, the T cell depleting agent is administered once it is desirable to reduce or eliminate the CAR-expressing cell, e.g., to mitigate the CAR induced toxicity. In other embodiments, the T cell depleting agent is an anti-CD52 antibody, e.g., alemtuzumab.

[0681] In an aspect, a RCAR comprises a set of polypeptides, typically two in the simplest embodiments, in which the components of a standard CAR described herein, e.g., an antigen binding domain and an intracellular signaling domain, are partitioned on separate polypeptides or members. In some embodiments, the set of polypeptides include a dimerization switch that, upon the presence of a dimerization molecule, can couple the polypeptides to one another, e.g., can couple an antigen binding domain to an intracellular signaling domain. In one embodiment, a CAR of the present invention utilizes a dimerization switch as those described in, e.g., WO2014127261, which is incorporated by reference herein. Additional description and exemplary configurations of such regulatable CARs are provided herein and in International Publication No. WO 2015/090229, hereby incorporated by reference in its entirety.

[0682] In some embodiments, an RCAR involves a switch domain, e.g., a FKBP switch domain, as set out SEQ ID NO: 122, or comprise a fragment of FKBP having the ability to bind with FRB, e.g., as set out in SEQ ID NO: 123. In some embodiments, the RCAR involves a switch domain comprising a FRB sequence, e.g., as set out in SEQ ID NO: 124, or a mutant FRB sequence, e.g., as set out in any of SEQ ID Nos. 125-130.D V P D Y A S L G G P S S P K KKRKVSRGVQVETISPGDGRTFPKRGQTCVVHYTGMLEDGK KFDSSRDRNKPFKFMLGKQEVIRGWEEGVAQMSVGQRAKLTI SPDYAYGATGHPGIIPPHATLVFDVELLKLETSY(SEQIDNO: 122)

(SEQ ID NO: 123)
V Q V E T I S P G D G R T F P K R G Q T C V V H Y
T G M L E D G K K F D S S R D R N K P F K F M L G
K Q E V I R G W E E G V A Q M S V G Q R A K L T I
S P D Y A Y G A T G H P G I I P P H A T L V F D V
E L L K L E T S
(SEQ ID NO: 124)
[sequence omitted]

TABLE 1
Exemplary mutant FRB having increased affinity for a dimerization molecule.

| | | SEQ |
|---|---|---|
| FRB mutant | Amino Acid Sequence | ID NO: |
| E2032I mutant | ILWHEMWHEGLIEASRLYFGERNVKGMFEVLEPLHAMMERGPQTLKETSFNQAYGR | 125 |
| | DLMEAQEWCRKYMKSGNVKDLTQAWDLYYHVFRRISKTS | |
| E2032L mutant | ILWHEMWHEGLLEASRLYFGERNVKGMFEVLEPLHAMMERGPQTLKETSFNQAYGR | 126 |
| | DLMEAQEWCRKYMKSGNVKDLTQAWDLYYHVFRRISKTS | |
| T2098L mutant | ILWHEMWHEGLEEASRLYFGERNVKGMFEVLEPLHAMMERGPQTLKETSFNQAYGR | 127 |
| | DLMEAQEWCRKYMKSGNVKDLLQAWDLYYHVFRRISKTS | |
| E2032, T2098 | ILWHEMWHEGLXEASRLYFGERNVKGMFEVLEPLHAMMERGPQTLKETSFNQAYGR | 128 |
| mutant | DLMEAQEWCRKYMKSGNVKDLXQAWDLYYHVFRRISKTS | |
| E2032I, T2098L | ILWHEMWHEGLIEASRLYFGERNVKGMFEVLEPLHAMMERGPQTLKETSFNQAYGR | 129 |
| mutant | DLMEAQEWCRKYMKSGNVKDLLQAWDLYYHVERRISKTS | |
| E2032L, T2098L | ILWHEMWHEGLLEASRLYFGERNVKGMFEVLEPLHAMMERGPQTLKETSFNQAYGR | 130 |
| mutant | DLMEAQEWCRKYMKSGNVKDLLQAWDLYYHVERRISKTS | |

### Split CAR

[0683] In some embodiments, the CAR-expressing cell uses a split CAR. The split CAR approach is described in more detail in publications WO2014/055442 and WO2014/055657. Briefly, a split CAR system comprises a cell expressing a first CAR having a first antigen binding domain and a costimulatory domain (e.g., 41BB), and the cell also expresses a second CAR having a second antigen binding domain and an intracellular signaling domain (e.g., CD3 zeta). When the cell encounters the first antigen, the costimulatory domain is activated, and the cell proliferates. When the cell encounters the second antigen, the intracellular signaling domain is activated and cell-killing activity begins. Thus, the CAR-expressing cell is only fully activated in the presence of both antigens.

### RNA Transfection

[0684] Disclosed herein are methods for producing an in vitro transcribed RNA CAR. The present invention also includes (among other things) a CAR encoding RNA construct that can be directly transfected into a cell. A method for generating mRNA for use in transfection can involve in vitro transcription (IVT) of a template with specially designed primers, followed by polyA addition, to produce a construct containing 3′ and 5′ untranslated sequence (“UTR”), a 5′ cap and/or Internal Ribosome Entry Site (IRES), the nucleic acid to be expressed, and a polyA tail, typically 50-2000 bases in length (SEQ ID NO:118).

[0685] In one aspect the CAR is encoded by a messenger RNA (mRNA). In one aspect the mRNA encoding the CAR is introduced into an immune effector cell, e.g., a T cell or a NK cell, for production of a CAR-expressing cell, e.g., a CART cell or a CAR NK cell. In one embodiment, the in vitro transcribed RNA CAR can be introduced to a cell as a form of transient transfection.

[0686] Additional method of RNA transfection are described on pages 192-196 of International Application WO 2016/164731, filed Apr. 8, 2016, which is incorporated by reference in its entirety.

### Non-Viral Delivery Methods

[0687] In some aspects, non-viral methods can be used to deliver a nucleic acid encoding a CAR described herein into a cell or tissue or a subject. In some embodiments, the non-viral method includes the use of a transposon (also called a transposable element). In some embodiments, a transposon is a piece of DNA that can insert itself at a location in a genome, for example, a piece of DNA that is capable of self-replicating and inserting its copy into a genome, or a piece of DNA that can be spliced out of a longer nucleic acid and inserted into another place in a genome.

[0688] Additional and exemplary transposons and non-viral delivery methods are described on pages 196-198 of International Application WO 2016/164731, filed Apr. 8, 2016, which is incorporated by reference in its entirety.

### Nucleic Acid Constructs Encoding a CAR

[0689] The present invention also provides nucleic acid molecules encoding one or more CAR constructs described herein, e.g., CD19 CAR, CD20 CAR, or CD22 CAR. In one aspect, the nucleic acid molecule is provided as a messenger RNA transcript. In one aspect, the nucleic acid molecule is provided as a DNA construct.

[0690] Accordingly, in one aspect, the invention pertains to an isolated nucleic acid molecule encoding a chimeric antigen receptor (CAR), wherein the CAR comprises a binding domain (e.g., that binds CD19, CD20, or CD22) a transmembrane domain, and an intracellular signaling domain comprising a stimulatory domain, e.g., a costimulatory signaling domain and/or a primary signaling domain, e.g., zeta chain.

[0691] In one embodiment, the binding domain is an anti-CD19 binding domain described herein, e.g., an anti-CD19 binding domain which comprises a sequence selected from a group consisting of SEQ ID NO:1, SEQ ID NO:2, SEQ ID NO:3, SEQ ID NO:4, SEQ ID NO:5, SEQ ID NO:6, SEQ ID NO:7, SEQ ID NO:8, SEQ ID NO:9, SEQ ID NO:10, SEQ ID NO:11, SEQ ID NO:12 and SEQ ID NO:59, or a sequence with 95-99% identity thereof.

[0692] In one embodiment, the nucleic acid comprises CD22-encoding a nucleic acid set out in Table 6A on pages 364-403 of International Application WO 2016/164731, filed Apr. 8, 2016, which is incorporated by reference in its entirety, or a sequence with 95-99% identity thereof

[0693] In one embodiment, the nucleic acid comprises CD20-encoding a nucleic acid set out in Table 11A on pages 422-446 of International Application WO 2016/164731, filed Apr. 8, 2016, which is incorporated by reference in its entirety, or a sequence with 95-99% identity thereof.

[0694] In one embodiment, the transmembrane domain is transmembrane domain of a protein selected from the group consisting of the alpha, beta or zeta chain of the T-cell receptor, CD28, CD3 epsilon, CD45, CD4, CD5, CD8, CD9, CD16, CD22, CD33, CD37, CD64, CD80, CD86, CD134, CD137 and CD154. In one embodiment, the transmembrane domain comprises a sequence of SEQ ID NO: 15, or a sequence with 95-99% identity thereof. In one embodiment, the anti-CD19 binding domain is connected to the transmembrane domain by a hinge region, e.g., a hinge described herein. In one embodiment, the hinge region comprises SEQ ID NO:14 or SEQ ID NO:45 or SEQ ID NO:47 or SEQ ID NO:49, or a sequence with 95-99% identity thereof. In one embodiment, the isolated nucleic acid molecule further comprises a sequence encoding a costimulatory domain. In one embodiment, the costimulatory domain is a functional signaling domain of a protein selected from the group consisting of OX40, CD27, CD28, CDS, ICAM-1, LFA-1 (CD11a/CD18), ICOS (CD278), and 4-1BB (CD137). In one embodiment, the costimulatory domain is a functional signaling domain of a protein selected from the group consisting of MHC class I molecule, TNF receptor proteins, Immunoglobulin-like proteins, cytokine receptors, integrins, signaling lymphocytic activation molecules (SLAM proteins), activating NK cell receptors, BTLA, a Toll ligand receptor, OX40, CD2, CD7, CD27, CD28, CD30, CD40, CDS, ICAM-1, LFA-1 (CD11a/CD18), 4-1BB (CD137), B7-H3, CDS, ICAM-1, ICOS (CD278), GITR, BAFFR, LIGHT, HVEM (LIGHTR), KIRDS2, SLAMF7, NKp80 (KLRF1), NKp44, NKp30, NKp46, CD19, CD4, CD8alpha, CD8beta, IL2R beta, IL2R gamma, IL7R alpha, ITGA4, VLA1, CD49a, ITGA4, IA4, CD49D, ITGA6, VLA-6, CD49f, ITGAD, CD11d, ITGAE, CD103, ITGAL, CD11a, LFA-1, ITGAM, CD11b, ITGAX, CD11c, ITGB1, CD29, ITGB2, CD18, LFA-1, ITGB7, NKG2D, NKG2C, TNFR2, TRANCE/RANKL, DNAM1 (CD226), SLAMF4 (CD244, 2B4), CD84, CD96 (Tactile), CEACAM1, CRTAM, Ly9 (CD229), CD160 (BY55), PSGL1, CD100 (SEMA4D), CD69, SLAMF6 (NTB-A, Ly108), SLAM (SLAMF1, CD150, IPO-3), BLAME (SLAMF8), SELPLG (CD162), LTBR, LAT, GADS, SLP-76, PAG/Cbp, CD19a, and a ligand that specifically binds with CD83. In one embodiment, the costimulatory domain comprises a sequence of SEQ ID NO:16, or a sequence with 95-99% identity thereof. In one embodiment, the intracellular signaling domain comprises a functional signaling domain of 4-1BB and a functional signaling domain of CD3 zeta. In one embodiment, the intracellular signaling domain comprises the sequence of SEQ ID NO: 16 or SEQ ID NO:51, or a sequence with 95-99% identity thereof, and the sequence of SEQ ID NO: 17 or SEQ ID NO:43, or a sequence with 95-99% identity thereof, wherein the sequences comprising the intracellular signaling domain are expressed in the same frame and as a single polypeptide chain.

[0695] In another aspect, the invention pertains to an isolated nucleic acid molecule encoding a CAR construct comprising a leader sequence of SEQ ID NO: 13, a scFv domain having a sequence selected from the group consisting of SEQ ID NO:1, SEQ ID NO:2, SEQ ID NO:3, SEQ ID NO:4, SEQ ID NO:5, SEQ ID NO:6, SEQ ID NO:7, SEQ ID NO:8, SEQ ID NO:9, SEQ ID NO:10, SEQ ID NO:11, SEQ ID NO:12, and SEQ ID NO:59, (or a sequence with 95-99% identity thereof), a hinge region of SEQ ID NO:14 or SEQ ID NO:45 or SEQ ID NO:47 or SEQ ID NO:49 (or a sequence with 95-99% identity thereof), a transmembrane domain having a sequence of SEQ ID NO: 15 (or a sequence with 95-99% identity thereof), a 4-1BB costimulatory domain having a sequence of SEQ ID NO:16 or a CD27 costimulatory domain having a sequence of SEQ ID NO:51 (or a sequence with 95-99% identity thereof), and a CD3 zeta stimulatory domain having a sequence of SEQ ID NO:17 or SEQ ID NO:43 (or a sequence with 95-99% identity thereof).

[0696] In another aspect, the invention pertains to an isolated polypeptide molecule encoded by the nucleic acid molecule. In one embodiment, the isolated polypeptide molecule comprises a sequence selected from the group consisting of SEQ ID NO:31, SEQ ID NO:32, SEQ ID NO:33, SEQ ID NO:34, SEQ ID NO:35, SEQ ID NO:36, SEQ ID NO:37, SEQ ID NO:38, SEQ ID NO:39, SEQ ID NO:40, SEQ ID NO:41, SEQ ID NO:42, SEQ ID NO:59 or a sequence with 95-99% identity thereof.

[0697] In another aspect, the invention pertains to a nucleic acid molecule encoding a chimeric antigen receptor (CAR) molecule that comprises an anti-CD19 binding domain, a transmembrane domain, and an intracellular signaling domain comprising a stimulatory domain, and wherein said anti-CD19 binding domain comprises a sequence selected from the group consisting of SEQ ID NO:1, SEQ ID NO:2, SEQ ID NO:3, SEQ ID NO:4, SEQ ID NO:5, SEQ ID NO:6, SEQ ID NO:7, SEQ ID NO:8, SEQ ID NO:9, SEQ ID NO:10, SEQ ID NO:11, SEQ ID NO:12 and SEQ ID NO:59, or a sequence with 95-99% identity thereof.

[0698] In one embodiment, the encoded CAR molecule (e.g., CD19 CAR, CD20 CAR, or CD22 CAR) further comprises a sequence encoding a costimulatory domain. In one embodiment, the costimulatory domain is a functional signaling domain of a protein selected from the group consisting of OX40, CD27, CD28, CDS, ICAM-1, LFA-1 (CD11a/CD18) and 4-1BB (CD137). In one embodiment, the costimulatory domain comprises a sequence of SEQ ID NO:16. In one embodiment, the transmembrane domain is a transmembrane domain of a protein selected from the group consisting of the alpha, beta or zeta chain of the T-cell receptor, CD28, CD3 epsilon, CD45, CD4, CD5, CD8, CD9, CD16, CD22, CD33, CD37, CD64, CD80, CD86, CD134, CD137 and CD154. In one embodiment, the transmembrane domain comprises a sequence of SEQ ID NO:15. In one embodiment, the intracellular signaling domain comprises a functional signaling domain of 4-1BB and a functional signaling domain of zeta. In one embodiment, the intracellular signaling domain comprises the sequence of SEQ ID NO: 16 and the sequence of SEQ ID NO: 17, wherein the sequences comprising the intracellular signaling domain are expressed in the same frame and as a single polypeptide chain. In one embodiment, the anti-CD19 binding domain is connected to the transmembrane domain by a hinge region. In one embodiment, the hinge region comprises SEQ ID NO:14. In one embodiment, the hinge region comprises SEQ ID NO:45 or SEQ ID NO:47 or SEQ ID NO:49.

[0699] In another aspect, the invention pertains to an encoded CAR molecule comprising a leader sequence of SEQ ID NO: 13, a scFv domain having a sequence selected from the group consisting of SEQ ID NO:1, SEQ ID NO:2, SEQ ID NO:3, SEQ ID NO:4, SEQ ID NO:5, SEQ ID NO:6, SEQ ID NO:7, SEQ ID NO:8, SEQ ID NO:9, SEQ ID NO:10, SEQ ID NO:11, SEQ ID NO:12, and SEQ ID NO:59, or a sequence with 95-99% identity thereof, a hinge region of SEQ ID NO:14 or SEQ ID NO:45 or SEQ ID NO:47 or SEQ ID NO:49, a transmembrane domain having a sequence of SEQ ID NO: 15, a 4-1BB costimulatory domain having a sequence of SEQ ID NO:16 or a CD27 costimulatory domain having a sequence of SEQ ID NO:51, and a CD3 zeta stimulatory domain having a sequence of SEQ ID NO:17 or SEQ ID NO:43. In one embodiment, the encoded CAR molecule comprises a sequence selected from a group consisting of SEQ ID NO:31, SEQ ID NO:32, SEQ ID NO:33, SEQ ID NO:34, SEQ ID NO:35, SEQ ID NO:36, SEQ ID NO:37, SEQ ID NO:38, SEQ ID NO:39, SEQ ID NO:40, SEQ ID NO:41, SEQ ID NO:42, and SEQ ID NO:59, or a sequence with 95-99% identity thereof.

[0700] The nucleic acid sequences coding for the desired molecules can be obtained using recombinant methods known in the art, such as, for example by screening libraries from cells expressing the gene, by deriving the gene from a vector known to include the same, or by isolating directly from cells and tissues containing the same, using standard techniques. Alternatively, the gene of interest can be produced synthetically, rather than cloned.

[0701] The present invention also provides vectors in which a DNA of the present invention is inserted. Vectors derived from retroviruses such as the lentivirus are suitable tools to achieve long-term gene transfer since they allow long-term, stable integration of a transgene and its propagation in daughter cells. Lentiviral vectors have the added advantage over vectors derived from onco-retroviruses such as murine leukemia viruses in that they can transduce non-proliferating cells, such as hepatocytes. They also have the added advantage of low immunogenicity. A retroviral vector may also be, e.g., a gammaretroviral vector. A gammaretroviral vector may include, e.g., a promoter, a packaging signal (W), a primer binding site (PBS), one or more (e.g., two) long terminal repeats (LTR), and a transgene of interest, e.g., a gene encoding a CAR. A gammaretroviral vector may lack viral structural gens such as gag, pol, and env. Exemplary gammaretroviral vectors include Murine Leukemia Virus (MLV), Spleen-Focus Forming Virus (SFFV), and Myeloproliferative Sarcoma Virus (MPSV), and vectors derived therefrom. Other gammaretroviral vectors are described, e.g., in Tobias Maetzig et al., “Gammaretroviral Vectors: Biology, Technology and Application” Viruses. 2011 June; 3(6): 677-713.

[0702] In another embodiment, the vector comprising the nucleic acid encoding the desired CAR of the invention is an adenoviral vector (A5/35). In another embodiment, the expression of nucleic acids encoding CARs can be accomplished using of transposons such as sleeping beauty, crispr, CAS9, and zinc finger nucleases. See below June et al. 2009Nature Reviews Immunology 9.10: 704-716, is incorporated herein by reference.

[0703] A vector may also include, e.g., a signal sequence to facilitate secretion, a polyadenylation signal and transcription terminator (e.g., from Bovine Growth Hormone (BGH) gene), an element allowing episomal replication and replication in prokaryotes (e.g. SV40 origin and Co1E1 or others known in the art) and/or elements to allow selection (e.g., ampicillin resistance gene and/or zeocin marker).

[0704] In brief summary, the expression of natural or synthetic nucleic acids encoding CARs is typically achieved by operably linking a nucleic acid encoding the CAR polypeptide or portions thereof to a promoter, and incorporating the construct into an expression vector. The vectors can be suitable for replication and integration eukaryotes. Typical cloning vectors contain transcription and translation terminators, initiation sequences, and promoters useful for regulation of the expression of the desired nucleic acid sequence.

[0705] In some aspects, the expression constructs of the present invention may also be used for nucleic acid immunization and gene therapy, using standard gene delivery protocols. Methods for gene delivery are known in the art. See, e.g., U.S. Pat. Nos. 5,399,346, 5,580,859, 5,589,466, incorporated by reference herein in their entireties. In another embodiment, the invention provides a gene therapy vector.

[0706] The nucleic acid can be cloned into a number of types of vectors. For example, the nucleic acid can be cloned into a vector including, but not limited to a plasmid, a phagemid, a phage derivative, an animal virus, and a cosmid. Vectors of particular interest include expression vectors, replication vectors, probe generation vectors, and sequencing vectors.

[0707] Further, the expression vector may be provided to a cell in the form of a viral vector. Viral vector technology is well known in the art and is described, for example, in Sambrook et al., 2012, MOLECULAR CLONING: A LABORATORY MANUAL, volumes 1-4, Cold Spring Harbor Press, NY), and in other virology and molecular biology manuals. Viruses, which are useful as vectors include, but are not limited to, retroviruses, adenoviruses, adeno-associated viruses, herpes viruses, and lentiviruses. In general, a suitable vector contains an origin of replication functional in at least one organism, a promoter sequence, convenient restriction endonuclease sites, and one or more selectable markers, (e.g., WO 01/96584; WO 01/29058; and U.S. Pat. No. 6,326,193).

[0708] A number of viral based systems have been developed for gene transfer into mammalian cells. For example, retroviruses provide a convenient platform for gene delivery systems. A selected gene can be inserted into a vector and packaged in retroviral particles using techniques known in the art. The recombinant virus can then be isolated and delivered to cells of the subject either in vivo or ex vivo. A number of retroviral systems are known in the art. In some embodiments, adenovirus vectors are used. A number of adenovirus vectors are known in the art. In one embodiment, lentivirus vectors are used.

[0709] Additional promoter elements, e.g., enhancers, regulate the frequency of transcriptional initiation. Typically, these are located in the region 30-110 bp upstream of the start site, although a number of promoters have been shown to contain functional elements downstream of the start site as well. The spacing between promoter elements frequently is flexible, so that promoter function is preserved when elements are inverted or moved relative to one another. In the thymidine kinase (tk) promoter, the spacing between promoter elements can be increased to 50 bp apart before activity begins to decline. Depending on the promoter, it appears that individual elements can function either cooperatively or independently to activate transcription. Exemplary promoters include the CMV IE gene, EF-1α, ubiquitin C, or phosphoglycerokinase (PGK) promoters. In an embodiment, the promoter is a PGK promoter, e.g., a truncated PGK promoter as described herein.

[0710] An example of a promoter that is capable of expressing a CAR transgene in a mammalian T cell is the EF1a promoter. The native EF1a promoter drives expression of the alpha subunit of the elongation factor-1 complex, which is responsible for the enzymatic delivery of aminoacyl tRNAs to the ribosome. The EF1a promoter has been extensively used in mammalian expression plasmids and has been shown to be effective in driving CAR expression from transgenes cloned into a lentiviral vector. See, e.g., Milone et al., Mol. Ther. 17(8): 1453-1464 (2009). In one aspect, the EF1a promoter comprises the sequence provided as SEQ ID NO:100.

[0711] Another example of a promoter is the immediate early cytomegalovirus (CMV) promoter sequence. This promoter sequence is a strong constitutive promoter sequence capable of driving high levels of expression of any polynucleotide sequence operatively linked thereto. However, other constitutive promoter sequences may also be used, including, but not limited to the simian virus 40 (SV40) early promoter, mouse mammary tumor virus (MMTV), human immunodeficiency virus (HIV) long terminal repeat (LTR) promoter, MoMuLV promoter, an avian leukemia virus promoter, an Epstein-Barr virus immediate early promoter, a Rous sarcoma virus promoter, as well as human gene promoters such as, but not limited to, the actin promoter, the myosin promoter, the elongation factor-1α promoter, the hemoglobin promoter, and the creatine kinase promoter. Further, the invention should not be limited to the use of constitutive promoters. Inducible promoters are also contemplated as part of the invention. The use of an inducible promoter provides a molecular switch capable of turning on expression of the polynucleotide sequence which it is operatively linked when such expression is desired, or turning off the expression when expression is not desired. Examples of inducible promoters include, but are not limited to a metallothionine promoter, a glucocorticoid promoter, a progesterone promoter, and a tetracycline promoter.

[0712] Another example of a promoter is the phosphoglycerate kinase (PGK) promoter. In embodiments, a truncated PGK promoter (e.g., a PGK promoter with one or more, e.g., 1, 2, 5, 10, 100, 200, 300, or 400, nucleotide deletions when compared to the wild-type PGK promoter sequence) may be desired. The nucleotide sequences of exemplary PGK promoters are provided below.

WT PGK Promoter:
(SEQ ID NO: 1323)
ACCCCTCTCTCCAGCCACTAAGCCAGTTGCTCCCTCGGCTGACGGCTGCA
CGCGAGGCCTCCGAACGTCTTACGCCTTGTGGCGCGCCCGTCCTTGTCCC
GGGTGTGATGGCGGGGTGTGGGGCGGAGGGCGTGGCGGGGAAGGGCCGGC
GACGAGAGCCGCGCGGGACGACTCGTCGGCGATAACCGGTGTCGGGTAGC
GCCAGCCGCGCGACGGTAACGAGGGACCGCGACAGGCAGACGCTCCCATG
ATCACTCTGCACGCCGAAGGCAAATAGTGCAGGCCGTGCGGCGCTTGGCG
TTCCTTGGAAGGGCTGAATCCCCGCCTCGTCCTTCGCAGCGGCCCCCCGG
GTGTTCCCATCGCCGCTTCTAGGCCCACTGCGACGCTTGCCTGCACTTCT
TACACGCTCTGGGTCCCAGCCGCGGCGACGCAAAGGGCCTTGGTGCGGGT
CTCGTCGGCGCAGGGACGCGTTTGGGTCCCGACGGAACCTTTTCCGCGTT
GGGGTTGGGGCACCATAAGCT

[0713] Exemplary truncated PGK Promoters:

PGK100:
(SEQ ID NO: 1324)
ACCCCTCTCTCCAGCCACTAAGCCAGTTGCTCCCTCGGCTGACGGCTGCA
CGCGAGGCCTCCGAACGTCTTACGCCTTGTGGCGCGCCCGTCCTTGTCCC
GGGTGTGATGGCGGGGTG
PGK200:
(SEQ ID NO: 1325)
ACCCCTCTCTCCAGCCACTAAGCCAGTTGCTCCCTCGGCTGACGGCTGCA
CGCGAGGCCTCCGAACGTCTTACGCCTTGTGGCGCGCCCGTCCTTGTCCC
GGGTGTGATGGCGGGGTGTGGGGCGGAGGGCGTGGCGGGGAAGGGCCGGC
GACGAGAGCCGCGCGGGACGACTCGTCGGCGATAACCGGTGTCGGGTAGC
GCCAGCCGCGCGACGGTAACG
PGK300:
(SEQ ID NO: 1326)
ACCCCTCTCTCCAGCCACTAAGCCAGTTGCTCCCTCGGCTGACGGCTGCA
CGCGAGGCCTCCGAACGTCTTACGCCTTGTGGCGCGCCCGTCCTTGTCCC
GGGTGTGATGGCGGGGTGTGGGGCGGAGGGCGTGGCGGGGAAGGGCCGGC
GACGAGAGCCGCGCGGGACGACTCGTCGGCGATAACCGGTGTCGGGTAGC
GCCAGCCGCGCGACGGTAACGAGGGACCGCGACAGGCAGACGCTCCCATG
ATCACTCTGCACGCCGAAGGCAAATAGTGCAGGCCGTGCGGCGCTTGGCG
TTCCTTGGAAGGGCTGAATCCCCG
PGK400:
(SEQ ID NO: 1327)
ACCCCTCTCTCCAGCCACTAAGCCAGTTGCTCCCTCGGCTGACGGCTGCA
CGCGAGGCCTCCGAACGTCTTACGCCTTGTGGCGCGCCCGTCCTTGTCCC
GGGTGTGATGGCGGGGTGTGGGGCGGAGGGCGTGGCGGGGAAGGGCCGGC
GACGAGAGCCGCGCGGGACGACTCGTCGGCGATAACCGGTGTCGGGTAGC
GCCAGCCGCGCGACGGTAACGAGGGACCGCGACAGGCAGACGCTCCCATG
ATCACTCTGCACGCCGAAGGCAAATAGTGCAGGCCGTGCGGCGCTTGGCG
TTCCTTGGAAGGGCTGAATCCCCGCCTCGTCCTTCGCAGCGGCCCCCCGG
GTGTTCCCATCGCCGCTTCTAGGCCCACTGCGACGCTTGCCTGCACTTCT
TACACGCTCTGGGTCCCAGCCG

[0714] A vector may also include, e.g., a signal sequence to facilitate secretion, a polyadenylation signal and transcription terminator (e.g., from Bovine Growth Hormone (BGH) gene), an element allowing episomal replication and replication in prokaryotes (e.g. SV40 origin and Co1E1 or others known in the art) and/or elements to allow selection (e.g., ampicillin resistance gene and/or zeocin marker).

[0715] In order to assess the expression of a CAR polypeptide or portions thereof, the expression vector to be introduced into a cell can also contain either a selectable marker gene or a reporter gene or both to facilitate identification and selection of expressing cells from the population of cells sought to be transfected or infected through viral vectors. In other aspects, the selectable marker may be carried on a separate piece of DNA and used in a co-transfection procedure. Both selectable markers and reporter genes may be flanked with appropriate regulatory sequences to enable expression in the host cells. Useful selectable markers include, for example, antibiotic-resistance genes, such as neo and the like.

[0716] Reporter genes are used for identifying potentially transfected cells and for evaluating the functionality of regulatory sequences. In general, a reporter gene is a gene that is not present in or expressed by the recipient organism or tissue and that encodes a polypeptide whose expression is manifested by some easily detectable property, e.g., enzymatic activity. Expression of the reporter gene is assayed at a suitable time after the DNA has been introduced into the recipient cells. Suitable reporter genes may include genes encoding luciferase, beta-galactosidase, chloramphenicol acetyl transferase, secreted alkaline phosphatase, or the green fluorescent protein gene (e.g., Ui-Tei et al., 2000 FEBS Letters 479: 79-82). Suitable expression systems are well known and may be prepared using known techniques or obtained commercially. In general, the construct with the minimal 5′ flanking region showing the highest level of expression of reporter gene is identified as the promoter. Such promoter regions may be linked to a reporter gene and used to evaluate agents for the ability to modulate promoter-driven transcription.

[0717] In embodiments, the vector may comprise two or more nucleic acid sequences encoding a CAR, e.g., a first CAR that binds to CD19 and a second CAR, e.g., an inhibitory CAR or a CAR that specifically binds to a second antigen, e.g., CD10, CD20, CD22, CD34, CD123, FLT-3, ROR1, CD79b, CD179b, or CD79a. In such embodiments, the two or more nucleic acid sequences encoding the CAR are encoded by a single nucleic molecule in the same frame and as a single polypeptide chain. In this aspect, the two or more CARs, can, e.g., be separated by one or more peptide cleavage sites. (e.g., an auto-cleavage site or a substrate for an intracellular protease). Examples of peptide cleavage sites include the following, wherein the GSG residues are optional:

T2A:
(SEQ ID NO: 1328)
(GSG)EGRGSLLTCGDVEENPGP
P2A:
(SEQ ID NO: 1329)
(GSG)ATNFSLLKQAGDVEENPGP
E2A:
(SEQ ID NO: 1330)
(GSG)QCTNYALLKLAGDVESNPGP
F2A:
(SEQ ID NO: 1331)
(GSG)VKQTLNFDLLKLAGDVESNPGP

[0718] Methods of introducing and expressing genes into a cell are known in the art. In the context of an expression vector, the vector can be readily introduced into a host cell, e.g., mammalian, bacterial, yeast, or insect cell by any method in the art. For example, the expression vector can be transferred into a host cell by physical, chemical, or biological means.

[0719] Physical methods for introducing a polynucleotide into a host cell include calcium phosphate precipitation, lipofection, particle bombardment, microinjection, electroporation, and the like. Methods for producing cells comprising vectors and/or exogenous nucleic acids are well-known in the art. See, for example, Sambrook et al., 2012, MOLECULAR CLONING: A LABORATORY MANUAL, volumes 1-4, Cold Spring Harbor Press, NY). A suitable method for the introduction of a polynucleotide into a host cell is calcium phosphate transfection

[0720] Biological methods for introducing a polynucleotide of interest into a host cell include the use of DNA and RNA vectors. Viral vectors, and especially retroviral vectors, have become the most widely used method for inserting genes into mammalian, e.g., human cells. Other viral vectors can be derived from lentivirus, poxviruses, herpes simplex virus I, adenoviruses and adeno-associated viruses, and the like. See, for example, U.S. Pat. Nos. 5,350,674 and 5,585,362.

[0721] Chemical means for introducing a polynucleotide into a host cell include colloidal dispersion systems, such as macromolecule complexes, nanocapsules, microspheres, beads, and lipid-based systems including oil-in-water emulsions, micelles, mixed micelles, and liposomes. An exemplary colloidal system for use as a delivery vehicle in vitro and in vivo is a liposome (e.g., an artificial membrane vesicle). Other methods of state-of-the-art targeted delivery of nucleic acids are available, such as delivery of polynucleotides with targeted nanoparticles or other suitable sub-micron sized delivery system.

[0722] In the case where a non-viral delivery system is utilized, an exemplary delivery vehicle is a liposome. The use of lipid formulations is contemplated for the introduction of the nucleic acids into a host cell (in vitro, ex vivo or in vivo). In another aspect, the nucleic acid may be associated with a lipid. The nucleic acid associated with a lipid may be encapsulated in the aqueous interior of a liposome, interspersed within the lipid bilayer of a liposome, attached to a liposome via a linking molecule that is associated with both the liposome and the oligonucleotide, entrapped in a liposome, complexed with a liposome, dispersed in a solution containing a lipid, mixed with a lipid, combined with a lipid, contained as a suspension in a lipid, contained or complexed with a micelle, or otherwise associated with a lipid. Lipid, lipid/DNA or lipid/expression vector associated compositions are not limited to any particular structure in solution. For example, they may be present in a bilayer structure, as micelles, or with a “collapsed” structure. They may also simply be interspersed in a solution, possibly forming aggregates that are not uniform in size or shape. Lipids are fatty substances which may be naturally occurring or synthetic lipids. For example, lipids include the fatty droplets that naturally occur in the cytoplasm as well as the class of compounds which contain long-chain aliphatic hydrocarbons and their derivatives, such as fatty acids, alcohols, amines, amino alcohols, and aldehydes.

[0723] Lipids suitable for use can be obtained from commercial sources. For example, dimyristyl phosphatidylcholine (“DMPC”) can be obtained from Sigma, St. Louis, MO; dicetyl phosphate (“DCP”) can be obtained from K & K Laboratories (Plainview, NY); cholesterol (“Choi”) can be obtained from Calbiochem-Behring; dimyristyl phosphatidylglycerol (“DMPG”) and other lipids may be obtained from Avanti Polar Lipids, Inc. (Birmingham, AL.). Stock solutions of lipids in chloroform or chloroform/methanol can be stored at about −20° C. Chloroform is used as the only solvent since it is more readily evaporated than methanol. “Liposome” is a generic term encompassing a variety of single and multilamellar lipid vehicles formed by the generation of enclosed lipid bilayers or aggregates. Liposomes can be characterized as having vesicular structures with a phospholipid bilayer membrane and an inner aqueous medium. Multilamellar liposomes have multiple lipid layers separated by aqueous medium. They form spontaneously when phospholipids are suspended in an excess of aqueous solution. The lipid components undergo self-rearrangement before the formation of closed structures and entrap water and dissolved solutes between the lipid bilayers (Ghosh et al., 1991 Glycobiology 5: 505-10). However, compositions that have different structures in solution than the normal vesicular structure are also encompassed. For example, the lipids may assume a micellar structure or merely exist as nonuniform aggregates of lipid molecules. Also contemplated are lipofectamine-nucleic acid complexes.

[0724] Regardless of the method used to introduce exogenous nucleic acids into a host cell or otherwise expose a cell to the inhibitor of the present invention, in order to confirm the presence of the recombinant DNA sequence in the host cell, a variety of assays may be performed. Such assays include, for example, “molecular biological” assays well known to those of skill in the art, such as Southern and Northern blotting, RT-PCR and PCR; “biochemical” assays, such as detecting the presence or absence of a particular peptide, e.g., by immunological means (ELISAs and Western blots) or by assays described herein to identify agents falling within the scope of the invention.

[0725] The present invention further provides a vector comprising a CAR encoding nucleic acid molecule. In one aspect, a CAR vector can be directly transduced into a cell, e.g., a T cell. In one aspect, the vector is a cloning or expression vector, e.g., a vector including, but not limited to, one or more plasmids (e.g., expression plasmids, cloning vectors, minicircles, minivectors, double minute chromosomes), retroviral and lentiviral vector constructs. In one aspect, the vector is capable of expressing the CAR construct in mammalian T cells. In one aspect, the mammalian T cell is a human T cell.

### Immune Effector Cells Expressing a CAR

[0726] In another aspect, the present invention provides a population of CAR-expressing cells. In some embodiments, the population of CAR-expressing cells comprises a cell that expresses one or more CARs described herein. In some embodiments, the population of CAR-expressing cells comprises a mixture of cells expressing different CARs.

[0727] For example, in one embodiment, the population of CART cells can include a first cell expressing a CAR having an antigen binding domain to a tumor antigen described herein, e.g., CD19, and a second cell expressing a CAR having a different antigen binding domain, e.g., an antigen binding domain to a different tumor antigen described herein, e.g., an antigen binding domain to a tumor antigen described herein that differs from the tumor antigen bound by the antigen binding domain of the CAR expressed by the first cell, e.g., CD10, CD20, CD22, CD34, CD123, FLT-3, ROR1, CD79b, CD179b, or CD79a.

[0728] As another example, the population of CAR-expressing cells can include a first cell expressing a CAR that includes an antigen binding domain to a tumor antigen described herein, and a second cell expressing a CAR that includes an antigen binding domain to a target other than a tumor antigen as described herein. In one embodiment, the population of CAR-expressing cells includes, e.g., a first cell expressing a CAR that includes a primary intracellular signaling domain, and a second cell expressing a CAR that includes a secondary signaling domain. Either one or both of the CAR expressing cells can have a truncated PGK promoter, e.g., as described herein, operably linked to the nucleic acid encoding the CAR.

[0729] In another aspect, the present invention provides a population of cells wherein at least one cell in the population expresses a CAR having an antigen binding domain to a tumor antigen described herein, and a second cell expressing another agent, e.g., an agent which enhances the activity of a CAR-expressing cell. The CAR expressing cells of the population can have a truncated PGK promoter, e.g., as described herein, operably linked to the nucleic acid encoding the CAR. In one embodiment, the agent can be an agent which inhibits an inhibitory molecule. Inhibitory molecules, e.g., PD-1, can, in some embodiments, decrease the ability of a CAR-expressing cell to mount an immune effector response. Examples of inhibitory molecules include PD-1, PD-L1, PD-L2, CTLA4, TIM3, CEACAM (CEACAM-1, CEACAM-3, and/or CEACAM-5), LAG3, VISTA, BTLA, TIGIT, LAIR1, CD160, 2B4, CD80, CD86, B7-H3 (CD276), B7-H4 (VTCN1), HVEM (TNFRSF14 or CD270), KIR, A2aR, MHC class I, MHC class II, GAL9, adenosine, and TGF (e.g., TGF beta). In one embodiment, the agent which inhibits an inhibitory molecule comprises a first polypeptide, e.g., an inhibitory molecule, associated with a second polypeptide that provides a positive signal to the cell, e.g., an intracellular signaling domain described herein. In one embodiment, the agent comprises a first polypeptide, e.g., of an inhibitory molecule such as PD1, PD-L1, CTLA4, TIM3, CEACAM (e.g., CEACAM-1, CEACAM-3, and/or CEACAM-5), LAG3, VISTA, BTLA, TIGIT, LAIR1, CD160, 2B4 or TGF beta, or a fragment of any of these, and a second polypeptide which is an intracellular signaling domain described herein (e.g., comprising a costimulatory domain (e.g., 41BB, CD27, OX40 or CD28, e.g., as described herein) and/or a primary signaling domain (e.g., a CD3 zeta signaling domain described herein). In one embodiment, the agent comprises a first polypeptide of PD-1 or a fragment thereof, and a second polypeptide of an intracellular signaling domain described herein (e.g., a CD28 signaling domain described herein and/or a CD3 zeta signaling domain described herein).

Co-Expression of CAR with Other Molecules or Agents

### Co-Expression of a Second CAR

[0730] In one aspect, the CAR-expressing cell described herein can further comprise a second CAR, e.g., a second CAR that includes a different antigen binding domain, e.g., to the same target (CD19) or a different target (e.g., CD10, CD20, CD22, CD34, CD123, FLT-3, ROR1, CD79b, CD179b, or CD79a). In one embodiment, the second CAR includes an antigen binding domain to a target expressed on acute myeloid leukemia cells, such as, e.g., CD20, CD22, ROR1, CD10, CD33, CLL-1, CD34, CD123, FLT3, CD79b, CD179b, and CD79a. In one embodiment, the CAR-expressing cell comprises a first CAR that targets a first antigen and includes an intracellular signaling domain having a costimulatory signaling domain but not a primary signaling domain, and a second CAR that targets a second, different, antigen and includes an intracellular signaling domain having a primary signaling domain but not a costimulatory signaling domain. While not wishing to be bound by theory, placement of a costimulatory signaling domain, e.g., 4-1BB, CD28, CD27 or OX-40, onto the first CAR, and the primary signaling domain, e.g., CD3 zeta, on the second CAR can limit the CAR activity to cells where both targets are expressed. In one embodiment, the CAR expressing cell comprises a first CD19 CAR that includes a CD19 binding domain, a transmembrane domain and a costimulatory domain and a second CAR that targets an antigen other than CD19 (e.g., an antigen expressed on AML cells, e.g., CD22, CD20, ROR1, CD10, CD33, CLL-1, CD34, CD123, FLT3, CD79b, CD179b, or CD79a) and includes an antigen binding domain, a transmembrane domain and a primary signaling domain. In another embodiment, the CAR expressing cell comprises a first CD19 CAR that includes a CD19 binding domain, a transmembrane domain and a primary signaling domain and a second CAR that targets an antigen other than CD19 (e.g., an antigen expressed on AML cells, e.g., CD22, CD20, ROR1, CD10, CD33, CD123, CLL-1, CD34, FLT3, CD79b, CD179b, or CD79a) and includes an antigen binding domain to the antigen, a transmembrane domain and a costimulatory signaling domain.

[0731] In one aspect, the CAR-expressing cell described herein can further comprise a second CAR, e.g., a second CAR that includes a different antigen binding domain, e.g., to the same target (e.g., CD19) or a different target (e.g., a target other than CD19, e.g., CD10, CD20, CD22, CD34, CD123, FLT-3, ROR1, CD79b, CD179b, or CD79a). In one embodiment, the CAR-expressing cell comprises a first CAR that targets a first antigen and includes an intracellular signaling domain having a costimulatory signaling domain but not a primary signaling domain, and a second CAR that targets a second, different, antigen and includes an intracellular signaling domain having a primary signaling domain but not a costimulatory signaling domain. Placement of a costimulatory signaling domain, e.g., 4-1BB, CD28, CD27, OX-40 or ICOS, onto the first CAR, and the primary signaling domain, e.g., CD3 zeta, on the second CAR can limit the CAR activity to cells where both targets are expressed. In one embodiment, the CAR expressing cell comprises a first CAR that includes an antigen binding domain, a transmembrane domain and a costimulatory domain and a second CAR that targets another antigen and includes an antigen binding domain, a transmembrane domain and a primary signaling domain. In another embodiment, the CAR expressing cell comprises a first CAR that includes an antigen binding domain, a transmembrane domain and a primary signaling domain and a second CAR that targets another antigen and includes an antigen binding domain to the antigen, a transmembrane domain and a costimulatory signaling domain.

[0732] In one embodiment, the CAR-expressing cell comprises an XCAR described herein (e.g., CD19 CAR, CD20 CAR, or CD22 CAR) and an inhibitory CAR. In one embodiment, the CAR-expressing cell comprises a CD19 CAR described herein and an inhibitory CAR. In one embodiment, the inhibitory CAR comprises an antigen binding domain that binds an antigen found on normal cells but not cancer cells, e.g., normal cells that also express CD19. In one embodiment, the inhibitory CAR comprises the antigen binding domain, a transmembrane domain and an intracellular domain of an inhibitory molecule. For example, the intracellular domain of the inhibitory CAR can be an intracellular domain PD-1, PD-L1, PD-L2, CTLA4, TIM3, CEACAM (CEACAM-1, CEACAM-3, and/or CEACAM-5), LAG3, VISTA, BTLA, TIGIT, LAIR1, CD160, 2B4, CD80, CD86, B7-H3 (CD276), B7-H4 (VTCN1), HVEM (TNFRSF14 or CD270), KIR, A2aR, MHC class I, MHC class II, GAL9, adenosine, and TGF (e.g., TGF beta).

[0733] In one embodiment, when the CAR-expressing cell comprises two or more different CARs, the antigen binding domains of the different CARs can be such that the antigen binding domains do not interact with one another. For example, a cell expressing a first and second CAR can have an antigen binding domain of the first CAR, e.g., as a fragment, e.g., an scFv, that does not form an association with the antigen binding domain of the second CAR, e.g., the antigen binding domain of the second CAR is a VHH.

Co-Expression of an Agent that Enhances CAR Activity

[0734] In another aspect, the CAR-expressing cell described herein can further express another agent, e.g., an agent that enhances the activity or fitness of a CAR-expressing cell.

[0735] For example, in one embodiment, the agent can be an agent which inhibits a molecule that modulates or regulates, e.g., inhibits, T cell function. In some embodiments, the molecule that modulates or regulates T cell function is an inhibitory molecule. Inhibitory molecules, e.g., PD1, can, in some embodiments, decrease the ability of a CAR-expressing cell to mount an immune effector response. Examples of inhibitory molecules include PD1, PD-L1, PD-L2, CTLA4, TIM3, CEACAM (e.g., CEACAM-1, CEACAM-3 and/or CEACAM-5), LAG3, VISTA, BTLA, TIGIT, LAIR1, CD160, 2B4, CD160, 2B4, CD80, CD86, B7-H3 (CD276), B7-H4 (VTCN1), HVEM (TNFRSF14 or CD270), KIR, A2aR, MHC class I, MHC class II, GAL9, adenosine, and TGF (e.g., TGF beta).

[0736] In one embodiment, an inhibitory nucleic acid, e.g., an inhibitory nucleic acid, e.g., a dsRNA, e.g., an siRNA or shRNA, a clustered regularly interspaced short palindromic repeats (CRISPR), a transcription-activator like effector nuclease (TALEN), or a zinc finger endonuclease (ZFN), e.g., as described herein, can be used to inhibit expression of a molecule that modulates or regulates, e.g., inhibits, T-cell function in the CAR-expressing cell. In an embodiment the agent is an shRNA, e.g., an shRNA described herein. In an embodiment, the agent that modulates or regulates, e.g., inhibits, T-cell function is inhibited within a CAR-expressing cell. For example, a dsRNA molecule that inhibits expression of a molecule that modulates or regulates, e.g., inhibits, T-cell function is linked to the nucleic acid that encodes a component, e.g., all of the components, of the CAR.

[0737] In one embodiment, the agent which inhibits an inhibitory molecule comprises a first polypeptide, e.g., an inhibitory molecule, associated with a second polypeptide that provides a positive signal to the cell, e.g., an intracellular signaling domain described herein. In one embodiment, the agent comprises a first polypeptide, e.g., of an inhibitory molecule such as PD1, PD-L1, PD-L2, CTLA4, TIM3, CEACAM (e.g., CEACAM-1, CEACAM-3 and/or CEACAM-5), LAG3, VISTA, BTLA, TIGIT, LAIR1, CD160, 2B4, CD160, 2B4, CD80, CD86, B7-H3 (CD276), B7-H4 (VTCN1), HVEM (TNFRSF14 or CD270), KIR, A2aR, MHC class I, MHC class II, GAL9, adenosine, or TGF (e.g., TGF beta), or a fragment of any of these (e.g., at least a portion of an extracellular domain of any of these), and a second polypeptide which is an intracellular signaling domain described herein (e.g., comprising a costimulatory domain (e.g., 41BB, CD27 or CD28, e.g., as described herein) and/or a primary signaling domain (e.g., a CD3 zeta signaling domain described herein). In one embodiment, the agent comprises a first polypeptide of PD1 or a fragment thereof (e.g., at least a portion of an extracellular domain of PD1), and a second polypeptide of an intracellular signaling domain described herein (e.g., a CD28 signaling domain described herein and/or a CD3 zeta signaling domain described herein). PD1 is an inhibitory member of the CD28 family of receptors that also includes CD28, CTLA-4, ICOS, and BTLA. PD-1 is expressed on activated B cells, T cells and myeloid cells (Agata et al. 1996 Int. Immunol 8:765-75). Two ligands for PD1, PD-L1 and PD-L2 have been shown to downregulate T cell activation upon binding to PD1 (Freeman et a. 2000 J Exp Med 192:1027-34; Latchman et al. 2001 Nat Immunol 2:261-8; Carter et al. 2002 Eur J Immunol 32:634-43). PD-L1 is abundant in human cancers (Dong et al. 2003 J Mol Med 81:281-7; Blank et al. 2005 Cancer Immunol. Immunother 54:307-314; Konishi et al. 2004 Clin Cancer Res 10:5094). Immune suppression can be reversed by inhibiting the local interaction of PD1 with PD-L1.

[0738] In one embodiment, the agent comprises the extracellular domain (ECD) of an inhibitory molecule, e.g., Programmed Death 1 (PD1), can be fused to a transmembrane domain and intracellular signaling domains such as 41BB and CD3 zeta (also referred to herein as a PD1 CAR). In one embodiment, the PD1 CAR, when used in combinations with a CD19 CAR described herein, improves the persistence of the T cell. In one embodiment, the CAR is a PD1 CAR comprising the extracellular domain of PD1 indicated as underlined in SEQ ID NO: 121. In one embodiment, the PD1 CAR comprises the amino acid sequence of SEQ ID NO:121.

(SEQ ID NO: 121)
Malpvtalllplalllhaarppgwfldspdrpwnpptfspallvvtegd
natftcsfsntsesfvlnwyrmspsnqtdklaafpedrsqpgqdcrfrv
tqlpngrdfhmsvvrarrndsgtylcgaislapkaqikeslraelrvte
rraevptahpspsprpagqfqtlvtttpaprpptpaptiasqplslrpe
acrpaaggavhtrgldfacdiyiwaplagtcgvlllslvitlyckrgrk
kllyifkqpfmrpvqttqeedgcscrfpeeeeggcelrvkfsrsadapa
ykqgqnqlynelnlgrreeydvldkrrgrdpemggkprrknpqeglyne
lqkdkmaeayseigmkgerrrgkghdglyqglstatkdtydalhmqalp
pr.

[0739] In one embodiment, the PD1 CAR comprises the amino acid sequence provided below (SEQ ID NO:119).

(SEQ ID NO: 119)
pgwfldspdrpwnpptfspallvvtegdnatftcsfsntsesfvlnwyr
mspsnqtdklaafpedrsqpgqdcrfrvtqlpngrdfhmsvvrarrnds
gtylcgaislapkaqikeslraelrvterraevptahpspsprpagqfq
tlvtttpaprpptpaptiasqplslrpeacrpaaggavhtrgldfacdi
yiwaplagtcgvlllslvitlyckrgrkkllyifkqpfmrpvqttqeed
gcscrfpeeeeggcelrvkfsrsadapaykqgqnqlynelnlgrreeyd
vldkrrgrdpemggkprrknpqeglynelqkdkmaeayseigmkgerrr
gkghdglyqglstatkdtydalhmqalppr.

[0740] Tin one embodiment, the agent comprises a nucleic acid sequence encoding the PD1 CAR, e.g., the PD1 CAR described herein. In one embodiment, the nucleic acid sequence for the PD1 CAR is shown below, with the PD1 ECD underlined below in SEQ ID NO: 120

(SEQ ID NO: 120)
atggccctccctgtcactgccctgcttctccccctcgcactcctgctcca
cgccgctagaccacccggatggtttctggactctccggatcgcccgtgga
atcccccaaccttctcaccggcactcttggttgtgactgagggcgataat
gcgaccttcacgtgctcgttctccaacacctccgaatcattcgtgctgaa
ctggtaccgcatgagcccgtcaaaccagaccgacaagctcgccgcgtttc
cggaagatcggtcgcaaccgggacaggattgtcggttccgcgtgactcaa
ctgccgaatggcagagacttccacatgagcgtggtccgcgctaggcgaaa
cgactccgggacctacctgtgcggagccatctcgctggcgcctaaggccc
aaatcaaagagagcttgagggccgaactgagagtgaccgagcgcagagct
gaggtgccaactgcacatccatccccatcgcctcggcctgcggggcagtt
tcagaccctggtcacgaccactccggcgccgcgcccaccgactccggccc
caactatcgcgagccagcccctgtcgctgaggccggaagcatgccgccct
gccgccggaggtgctgtgcatacccggggattggacttcgcatgcgacat
ctacatttgggctcctctcgccggaacttgtggcgtgctccttctgtccc
tggtcatcaccctgtactgcaagcggggtcggaaaaagcttctgtacatt
ttcaagcagcccttcatgaggcccgtgcaaaccacccaggaggaggacgg
ttgctcctgccggttccccgaagaggaagaaggaggttgcgagctgcgcg
tgaagttctcccggagcgccgacgcccccgcctataagcagggccagaac
cagctgtacaacgaactgaacctgggacggcgggaagagtacgatgtgct
ggacaagcggcgcggccgggaccccgaaatgggcgggaagcctagaagaa
agaaccctcaggaaggcctgtataacgagctgcagaaggacaagatggcc
gaggcctactccgaaattgggatgaagggagagcggcggaggggaaaggg
gcacgacggcctgtaccaaggactgtccaccgccaccaaggacacatacg
atgccctgcacatgcaggcccttccccctcgc.

[0741] In another example, in one embodiment, the agent which enhances the activity of a CAR-expressing cell can be a costimulatory molecule or costimulatory molecule ligand. Examples of costimulatory molecules include MHC class I molecule, BTLA and a Toll ligand receptor, as well as OX40, CD27, CD28, CDS, ICAM-1, LFA-1 (CD11a/CD18), ICOS (CD278), and 4-1BB (CD137). Further examples of such costimulatory molecules include CD5, ICAM-1, GITR, BAFFR, HVEM (LIGHTR), SLAMF7, NKp80 (KLRF1), NKp44, NKp30, NKp46, CD160, CD19, CD4, CD8alpha, CD8beta, IL2R beta, IL2R gamma, IL7R alpha, ITGA4, VLA1, CD49a, ITGA4, IA4, CD49D, ITGA6, VLA-6, CD49f, ITGAD, CD1Id, ITGAE, CD103, ITGAL, CD11a, LFA-1, ITGAM, CD11b, ITGAX, CD11c, ITGB1, CD29, ITGB2, CD18, LFA-1, ITGB7, NKG2D, NKG2C, TNFR2, TRANCE/RANKL, DNAM1 (CD226), SLAMF4 (CD244, 2B4), CD84, CD96 (Tactile), CEACAM1, CRTAM, Ly9 (CD229), CD160 (BY55), PSGL1, CD100 (SEMA4D), CD69, SLAMF6 (NTB-A, Ly108), SLAM (SLAMF1, CD150, IPO-3), BLAME (SLAMF8), SELPLG (CD162), LTBR, LAT, GADS, SLP-76, PAG/Cbp, CD19a, and a ligand that specifically binds with CD83., e.g., as described herein. Examples of costimulatory molecule ligands include CD80, CD86, CD40L, ICOSL, CD70, OX40L, 4-1BBL, GITRL, and LIGHT. In embodiments, the costimulatory molecule ligand is a ligand for a costimulatory molecule different from the costimulatory molecule domain of the CAR. In embodiments, the costimulatory molecule ligand is a ligand for a costimulatory molecule that is the same as the costimulatory molecule domain of the CAR. In an embodiment, the costimulatory molecule ligand is 4-1BBL. In an embodiment, the costimulatory ligand is CD80 or CD86. In an embodiment, the costimulatory molecule ligand is CD70. In embodiments, a CAR-expressing immune effector cell described herein can be further engineered to express one or more additional costimulatory molecules or costimulatory molecule ligands.

Co-expression of CAR with a Chemokine Receptor

[0742] In embodiments, the CAR-expressing cell described herein further comprises a chemokine receptor molecule. Transgenic expression of chemokine receptors CCR2b or CXCR2 in T cells enhances trafficking to CCL2- or CXCL1-secreting solid tumors including melanoma and neuroblastoma (Craddock et al., J Immunother. 2010 October; 33(8):780-8 and Kershaw et al., Hum Gene Ther. 2002 Nov. 1; 13(16):1971-80). Thus, without wishing to be bound by theory, it is believed that chemokine receptors expressed in CAR-expressing cells that recognize chemokines secreted by tumors, e.g., solid tumors, can improve homing of the CAR-expressing cell to the tumor, facilitate the infiltration of the CAR-expressing cell to the tumor, and enhances antitumor efficacy of the CAR-expressing cell. The chemokine receptor molecule can comprise a naturally occurring or recombinant chemokine receptor or a chemokine-binding fragment thereof. A chemokine receptor molecule suitable for expression in a CAR-expressing cell described herein include a CXC chemokine receptor (e.g., CXCR1, CXCR2, CXCR3, CXCR4, CXCR5, CXCR6, or CXCR7), a CC chemokine receptor (e.g., CCR1, CCR2, CCR3, CCR4, CCR5, CCR6, CCR7, CCR8, CCR9, CCR10, or CCR11), a CX3C chemokine receptor (e.g., CX3CR1), a XC chemokine receptor (e.g., XCR1), or a chemokine-binding fragment thereof. In one embodiment, the chemokine receptor molecule to be expressed with a CAR described herein is selected based on the chemokine(s) secreted by the tumor. In one embodiment, the CAR-expressing cell described herein further comprises, e.g., expresses, a CCR2b receptor or a CXCR2 receptor. In an embodiment, the CAR described herein and the chemokine receptor molecule are on the same vector or are on two different vectors. In embodiments where the CAR described herein and the chemokine receptor molecule are on the same vector, the CAR and the chemokine receptor molecule are each under control of two different promoters or are under the control of the same promoter.

### Conditional Expression of Immune Response-Enhancing Agents

[0743] Also provided herein are compositions and methods for conditionally expressing an agent that enhances the immune response or activity of a CAR-expressing cell described herein.

[0744] In one aspect, the present disclosure features an immune effector cell that is engineered to constitutively express a CAR, also referred to herein as a nonconditional CAR. In one embodiment, a nonconditional CAR as described herein comprises an antigen binding domain that binds to a cancer associated antigen, e.g., CD19, CD10, CD20, CD22, CD34, CD123, FLT-3, or ROR1. In embodiments, the nonconditional CAR-expressing immune effector cell further comprises a conditionally-expressed agent that enhances the therapeutic efficacy, e.g., the immune response, of the CAR-expressing immune effector cell. In such embodiments, the expression of the conditionally expressed agent occurs upon activation of the nonconditional CAR-expressing immune effector cell, e.g., upon binding of the nonconditional CAR molecule to its target, e.g., a cancer associated antigen, e.g., CD19, CD10, CD20, CD22, CD34, CD123, FLT-3, or ROR1.

[0745] Immune response-enhancing agents as described herein can be characterized by one or more of the following: 1) targets or binds to a different cancer associated antigen than that targeted by the nonconditional CAR; 2) inhibits the expression or activity of an immune checkpoint or inhibitory molecule; and/or 3) activates the expression and/or secretion of a component that enhances immune response or activation of an immune effector cell. The immune response-enhancing agent can be a polypeptide or a nucleic acid, e.g., a nucleic acid that encodes a polypeptide that enhances immune response. Examples of conditionally expressed agents that enhance the immune response include, but are not limited to, an additional CAR (referred to as a conditional CAR); a TCR-based molecule (e.g., a TCR-CAR); an inhibitor of an immune checkpoint or an inhibitory molecule; and/or a cytokine. In embodiments, the conditional CAR binds to a different cancer associated antigen than that targeted by the nonconditional CAR. In embodiments, the inhibitor of an immune checkpoint or inhibitory molecule described herein is an antibody or antigen binding fragment thereof, an inhibitory nucleic acid (e.g., an siRNA or shRNA), or a small molecule that inhibits or decreases the activity of an immune checkpoint or inhibitory molecule selected from PD1, PD-L1, CTLA4, TIM3, CEACAM (e.g., CEACAM-1, CEACAM-3 and/or CEACAM-5), LAG3, VISTA, BTLA, TIGIT, LAIR1, CD160, 2B4, CD80, CD86, B7-H3 (CD276), B7-H4 (VTCN1), HVEM (TNFRSF14 or CD270), KIR, A2aR, MHC class I, MHC class II, GAL9, adenosine, or TGF beta. In embodiments, the cytokine comprises IL-2, IL-7, IL-15, or IL-21, or functional fragments or derivatives thereof.

[0746] In embodiments, the immune effector cell comprises a nonconditional CAR and one or more conditional CARs, where the conditional CAR binds to a different cancer associated antigen than that targeted by the nonconditional CAR. By way of example, in one embodiment, an immune effector cell comprises a nonconditional CAR that binds to CD19 and one or more conditional CARs that bind to CD10, CD20, CD22, CD34, CD123, FLT-3, or ROR1, or a combination thereof. In another embodiment, an immune effector cell comprises a nonconditional CAR that binds to CD10, CD20, CD22, CD34, CD123, FLT-3, or ROR1 and a conditional CAR that binds to CD19.

[0747] Conditional expression of the agent that enhances the immune response upon activation of the CAR-expressing immune effector cell is achieved by operatively linking an activation-conditional control region to the agent that enhances the immune response (e.g., to a nucleic acid sequence encoding such an agent). In one embodiment, the activation conditional control region comprises a promoter sequence that initiates expression, e.g., transcription, of the operatively linked immune response enhancing agent upon activation of the immune effector cell. In one embodiment, the activation conditional control region comprises one or more regulatory sequences (e.g., a transcription factor binding sequence or site) that facilitate the initiation of expression upon activation of the immune effector cell. In embodiments, the activation-conditional control region comprises a promoter sequence and/or one or more transcription factor binding sequences from a promoter or regulatory sequence of a gene that is upregulated upon one or more of the following: immune effector cell (e.g., T cell) activation, T-cell differentiation, T-cell polarization, or helper T cell development. Examples of such genes include, but are not limited to, NFAT (nuclear factor of activated T cells), ATF2 (activating transcription factor 2), NF-κB (nuclear factor-κB), IL-2, IL-2 receptor (IL-2R), IL-3, GM-CSF, IL-4, IL-10, and IFN-7.

[0748] In one embodiment, the activation-conditional control region comprises one or more, e.g., 1, 2, 3, 4, 5, 6, or more, NFAT binding sequences or sites. In embodiments, the NFAT-binding sequence in the promoter comprises (5′-GGAAA-3′) (SEQ ID NO: 1312), optionally situated in a longer consensus sequence of 5′ (A/T)GGAAA(A/N)(A/T/C)N 3′ (SEQ ID NO: 1313). In embodiments, the NFAT-binding sequence is a Kb-like sequence such as GGGACT (SEQ ID NO: 1314). (See, Gibson et al., The Journal of Immunology, 2007, 179: 3831-3840.) In one embodiment, the activation-conditional control region further comprises an IL-2 promoter (or a minimal IL-2 promoter), an IL-2R promoter, an ATF2 promoter, or a NF-κB promoter, or any functional fragment or derivative thereof. In one embodiment, the activation-conditional control region comprises one or more NFAT-binding sequences, e.g., 3 or 6 NFAT-binding sequences, and an IL-2 promoter, e.g., an IL-2 minimal promoter. In one embodiment, the activation-conditional control region comprises the sequence of

(SEQ ID NO: 1315)
AGCTTGGATCCAAGAGGAAAATTTGTTTCATACAGAAGGCGTTAAGAGGA
AAATTTGTTTCATACAGAAGGCGTTAAGAGGAAAATTTGTTTCATACAGA
AGGCGTTCAAGCTTGTCGAC.

### Sources of Cells

[0749] Prior to expansion and genetic modification or other modification, a source of cells, e.g., T cells or natural killer (NK) cells, can be obtained from a subject. Examples of subjects include humans, monkeys, chimpanzees, dogs, cats, mice, rats, and transgenic species thereof. T cells can be obtained from a number of sources, including peripheral blood mononuclear cells, bone marrow, lymph node tissue, cord blood, thymus tissue, tissue from a site of infection, ascites, pleural effusion, spleen tissue, and tumors.

[0750] In embodiments, immune effector cells (e.g., a population of immune effector cells), e.g., T cells, are derived from (e.g., differentiated from) a stem cell, e.g., an embryonic stem cell or a pluripotent stem cell, e.g., an induced pluripotent stem cell (iPSC). In embodiments, the cells are autologous or allogeneic. In embodiments wherein the cells are allogeneic, the cells, e.g., derived from stem cells (e.g., iPSCs), are modified to reduce their alloreactivity. For example, the cells can be modified to reduce alloreactivity, e.g., by modifying (e.g., disrupting) their T cell receptor. In embodiments, a site specific nuclease can be used to disrupt the T cell receptor, e.g., after T-cell differentiation. In other examples, cells, e.g., T cells derived from iPSCs, can be generated from virus-specific T cells, which are less likely to cause graft-versus-host disease because of their recognition of a pathogen-derived antigen. In yet other examples, alloreactivity can be reduced, e.g., minimized, by generating iPSCs from common HLA haplotypes such that they are histocompatible with matched, unrelated recipient subjects. In yet other examples, alloreactivity can be reduced, e.g., minimized, by repressing HLA expression through genetic modification. For example, T cells derived from iPSCs can be processed as described in, e.g., Themeli et al. Nat. Biotechnol. 31.10(2013):928-35, incorporated herein by reference. In some examples, immune effector cells, e.g., T cells, derived from stem cells, can be processed/generated using methods described in WO2014/165707, incorporated herein by reference.

[0751] In certain aspects of the present disclosure, immune effector cells, e.g., T cells, can be obtained from a unit of blood collected from a subject using any number of techniques known to the skilled artisan, such as Ficoll™ separation. In one aspect, cells from the circulating blood of an individual are obtained by apheresis. The apheresis product typically contains lymphocytes, including T cells, monocytes, granulocytes, B cells, other nucleated white blood cells, red blood cells, and platelets. In one aspect, the cells collected by apheresis may be washed to remove the plasma fraction and, optionally, to place the cells in an appropriate buffer or media for subsequent processing steps. In one embodiment, the cells are washed with phosphate buffered saline (PBS). In an alternative embodiment, the wash solution lacks calcium and may lack magnesium or may lack many if not all divalent cations.

[0752] Initial activation steps in the absence of calcium can lead to magnified activation. As those of ordinary skill in the art would readily appreciate a washing step may be accomplished by methods known to those in the art, such as by using a semi-automated “flow-through” centrifuge (for example, the Cobe 2991 cell processor, the Baxter CytoMate, or the Haemonetics Cell Saver 5) according to the manufacturer's instructions. After washing, the cells may be resuspended in a variety of biocompatible buffers, such as, for example, Ca-free, Mg-free PBS, PlasmaLyte A, or other saline solution with or without buffer. Alternatively, the undesirable components of the apheresis sample may be removed and the cells directly resuspended in culture media.

[0753] It is recognized that the methods of the application can utilize culture media conditions comprising 5% or less, for example 2%, human AB serum, and employ known culture media conditions and compositions, for example those described in Smith et al., “Ex vivo expansion of human T cells for adoptive immunotherapy using the novel Xeno-free CTS Immune Cell Serum Replacement” Clinical & Translational Immunology (2015) 4, e31; doi:10.1038/cti.2014.31.

[0754] In one aspect, T cells are isolated from peripheral blood lymphocytes by lysing the red blood cells and depleting the monocytes, for example, by centrifugation through a PERCOLL™ gradient or by counterflow centrifugal elutriation.

[0755] The methods described herein can include, e.g., selection of a specific subpopulation of immune effector cells, e.g., T cells, that are a T regulatory cell-depleted population, CD25+ depleted cells, using, e.g., a negative selection technique, e.g., described herein. In some embodiments, the population of T regulatory depleted cells contains less than 30%, 25%, 20%, 15%, 10%, 5%, 4%, 3%, 2%, 1% of CD25+ cells.

[0756] In one embodiment, T regulatory cells, e.g., CD25+ T cells, are removed from the population using an anti-CD25 antibody, or fragment thereof, or a CD25-binding ligand, IL-2. In one embodiment, the anti-CD25 antibody, or fragment thereof, or CD25-binding ligand is conjugated to a substrate, e.g., a bead, or is otherwise coated on a substrate, e.g., a bead. In one embodiment, the anti-CD25 antibody, or fragment thereof, is conjugated to a substrate as described herein.

[0757] In one embodiment, the T regulatory cells, e.g., CD25+ T cells, are removed from the population using CD25 depletion reagent from Miltenyi™. In one embodiment, the ratio of cells to CD25 depletion reagent is le7 cells to 20 uL, or le7 cells to 15 uL, or le7 cells to 10 uL, or le7 cells to 5 uL, or le7 cells to 2.5 uL, or le7 cells to 1.25 uL. In one embodiment, e.g., for T regulatory cells, e.g., CD25+ depletion, greater than 500 million cells/ml is used. In a further aspect, a concentration of cells of 600, 700, 800, or 900 million cells/ml is used.

[0758] In one embodiment, the population of immune effector cells to be depleted includes about 6×10⁹ CD25+ T cells. In other aspects, the population of immune effector cells to be depleted include about 1×10⁹ to 1×10¹⁰ CD25+ T cell, and any integer value in between. In one embodiment, the resulting population T regulatory depleted cells has 2×10⁹ T regulatory cells, e.g., CD25+ cells, or less (e.g., 1×10⁹, 5×10⁸, 1×10⁸, 5×10⁷, 1×10⁷, or less CD25+ cells).

[0759] In one embodiment, the T regulatory cells, e.g., CD25+ cells, are removed from the population using the CliniMAC system with a depletion tubing set, such as, e.g., tubing 162-01. In one embodiment, the CliniMAC system is run on a depletion setting such as, e.g., DEPLETION2.1.

[0760] Without wishing to be bound by a particular theory, decreasing the level of negative regulators of immune cells (e.g., decreasing the number of unwanted immune cells, e.g., T_{REG} cells), in a subject prior to apheresis or during manufacturing of a CAR-expressing cell product significantly reduces the risk of subject relapse. For example, methods of depleting T_{REG} cells are known in the art. Methods of decreasing T_{REG} cells include, but are not limited to, cyclophosphamide, anti-GITR antibody (an anti-GITR antibody described herein), CD25-depletion, mTOR inhibitor, and combinations thereof.

[0761] In some embodiments, the manufacturing methods comprise reducing the number of (e.g., depleting) T_{REG} cells prior to manufacturing of the CAR-expressing cell. For example, manufacturing methods comprise contacting the sample, e.g., the apheresis sample, with an anti-GITR antibody and/or an anti-CD25 antibody (or fragment thereof, or a CD25-binding ligand), e.g., to deplete T_{REG} cells prior to manufacturing of the CAR-expressing cell (e.g., T cell, NK cell) product.

[0762] Without wishing to be bound by a particular theory, decreasing the level of negative regulators of immune cells (e.g., decreasing the number of unwanted immune cells, e.g., T_{REG} cells), in a subject prior to apheresis or during manufacturing of a CAR-expressing cell product can reduce the risk of a T_{REG} relapse. In an embodiment, a subject is pre-treated with one or more therapies that reduce TREG cells prior to collection of cells for CAR-expressing cell product manufacturing, thereby reducing the risk of subject relapse to CAR-expressing cell treatment. In an embodiment, methods of decreasing T_{REG} cells include, but are not limited to, administration to the subject of one or more of cyclophosphamide, anti-GITR antibody, CD25-depletion, or a combination thereof. In an embodiment, methods of decreasing T_{REG} cells include, but are not limited to, administration to the subject of one or more of cyclophosphamide, anti-GITR antibody, CD25-depletion, mTOR inhibitor, or a combination thereof. Administration of one or more of cyclophosphamide, anti-GITR antibody, CD25-depletion, or a combination thereof, can occur before, during or after an infusion of the CAR-expressing cell product. Administration of one or more of cyclophosphamide, anti-GITR antibody, CD25-depletion, mTOR inhibitor, or a combination thereof, can occur before, during or after an infusion of the CAR-expressing cell product.

[0763] In some embodiments, the manufacturing methods comprise reducing the number of (e.g., depleting) T_{REG} cells prior to manufacturing of the CAR-expressing cell. For example, manufacturing methods comprise contacting the sample, e.g., the apheresis sample, with an anti-GITR antibody and/or an anti-CD25 antibody (or fragment thereof, or a CD25-binding ligand), e.g., to deplete T_{REG} cells prior to manufacturing of the CAR-expressing cell (e.g., T cell, NK cell) product.

[0764] In an embodiment, a subject is pre-treated with one or more therapies that reduce T_{REG} cells prior to collection of cells for CAR-expressing cell product manufacturing, thereby reducing the risk of subject relapse to CAR-expressing cell treatment. In an embodiment, methods of decreasing T_{REG} cells include, but are not limited to, administration to the subject of one or more of cyclophosphamide, anti-GITR antibody, CD25-depletion, or a combination thereof. Administration of one or more of cyclophosphamide, anti-GITR antibody, CD25-depletion, or a combination thereof, can occur before, during or after an infusion of the CAR-expressing cell product.

[0765] In an embodiment, a subject is pre-treated with cyclophosphamide prior to collection of cells for CAR-expressing cell product manufacturing, thereby reducing the risk of subject relapse to CAR-expressing cell treatment. In an embodiment, a subject is pre-treated with an anti-GITR antibody prior to collection of cells for CAR-expressing cell product manufacturing, thereby reducing the risk of subject relapse to CAR-expressing cell treatment.

[0766] In one embodiment, the population of cells to be removed are neither the regulatory T cells or tumor cells, but cells that otherwise negatively affect the expansion and/or function of CART cells, e.g. cells expressing CD14, CD11b, CD33, CD15, or other markers expressed by potentially immune suppressive cells. In one embodiment, such cells are envisioned to be removed concurrently with regulatory T cells and/or tumor cells, or following said depletion, or in another order.

[0767] The methods described herein can include more than one selection step, e.g., more than one depletion step. Enrichment of a T cell population by negative selection can be accomplished, e.g., with a combination of antibodies directed to surface markers unique to the negatively selected cells. One method is cell sorting and/or selection via negative magnetic immunoadherence or flow cytometry that uses a cocktail of monoclonal antibodies directed to cell surface markers present on the cells negatively selected. For example, to enrich for CD4+ cells by negative selection, a monoclonal antibody cocktail can include antibodies to CD14, CD20, CD11b, CD16, HLA-DR, and CD8.

[0768] The methods described herein can further include removing cells from the population which express a tumor antigen, e.g., a tumor antigen that does not comprise CD25, e.g., CD19, CD30, CD38, CD123, CD20, CD14 or CD11b, to thereby provide a population of T regulatory depleted, e.g., CD25+ depleted, and tumor antigen depleted cells that are suitable for expression of a CAR, e.g., a CAR described herein. In one embodiment, tumor antigen expressing cells are removed simultaneously with the T regulatory, e.g., CD25+ cells. For example, an anti-CD25 antibody, or fragment thereof, and an anti-tumor antigen antibody, or fragment thereof, can be attached to the same substrate, e.g., bead, which can be used to remove the cells or an anti-CD25 antibody, or fragment thereof, or the anti-tumor antigen antibody, or fragment thereof, can be attached to separate beads, a mixture of which can be used to remove the cells. In other embodiments, the removal of T regulatory cells, e.g., CD25+ cells, and the removal of the tumor antigen expressing cells is sequential, and can occur, e.g., in either order.

[0769] Also provided are methods that include removing cells from the population which express a check point inhibitor, e.g., a check point inhibitor described herein, e.g., one or more of PD1+ cells, LAG3+ cells, and TIM3+ cells, to thereby provide a population of T regulatory depleted, e.g., CD25+ depleted cells, and check point inhibitor depleted cells, e.g., PD1+, LAG3+ and/or TIM3+ depleted cells. Exemplary check point inhibitors include PD1, PD-L1, PD-L2, CTLA4, TIM3, CEACAM (e.g., CEACAM-1, CEACAM-3 and/or CEACAM-5), LAG3, VISTA, BTLA, TIGIT, LAIR1, CD160, 2B4, CD80, CD86, B7-H3 (CD276), B7-H4 (VTCN1), HVEM (TNFRSF14 or CD270), KIR, A2aR, MHC class I, MHC class II, GAL9, adenosine, and TGF (e.g., TGF beta), e.g., as described herein. In one embodiment, check point inhibitor expressing cells are removed simultaneously with the T regulatory, e.g., CD25+ cells. For example, an anti-CD25 antibody, or fragment thereof, and an anti-check point inhibitor antibody, or fragment thereof, can be attached to the same bead which can be used to remove the cells, or an anti-CD25 antibody, or fragment thereof, and the anti-check point inhibitor antibody, or fragment thereof, can be attached to separate beads, a mixture of which can be used to remove the cells. In other embodiments, the removal of T regulatory cells, e.g., CD25+ cells, and the removal of the check point inhibitor expressing cells is sequential, and can occur, e.g., in either order.

[0770] Methods described herein can include a positive selection step For example, T cells can be isolated by incubation with anti-CD3/anti-CD28 (e.g., 3×28)-conjugated beads, such as DYNABEADS® M-450 CD3/CD28 T, for a time period sufficient for positive selection of the desired T cells. In one aspect, the time period is about 30 minutes. In a further aspect, the time period ranges from 30 minutes to 36 hours or longer and all integer values there between. In a further aspect, the time period is at least 1, 2, 3, 4, 5, or 6 hours. In yet another aspect, the time period is 10 to 24 hours. In one aspect, the incubation time period is 24 hours. Longer incubation times may be used to isolate T cells in any situation where there are few T cells as compared to other cell types, such in isolating tumor infiltrating lymphocytes (TIL) from tumor tissue or from immunocompromised individuals. Further, use of longer incubation times can increase the efficiency of capture of CD8+ T cells. Thus, by simply shortening or lengthening the time T cells are allowed to bind to the CD3/CD28 beads and/or by increasing or decreasing the ratio of beads to T cells (as described further herein), subpopulations of T cells can be preferentially selected for or against at culture initiation or at other time points during the process. Additionally, by increasing or decreasing the ratio of anti-CD3 and/or anti-CD28 antibodies on the beads or other surface, subpopulations of T cells can be preferentially selected for or against at culture initiation or at other desired time points.

[0771] In one embodiment, a T cell population can be selected that expresses one or more of IFN-γ, TNFα, IL-17A, IL-2, IL-3, IL-4, GM-CSF, IL-10, IL-13, granzyme B, and perforin, or other appropriate molecules, e.g., other cytokines. Methods for screening for cell expression can be determined, e.g., by the methods described in PCT Publication No.: WO 2013/126712.

[0772] For isolation of a desired population of cells by positive or negative selection, the concentration of cells and surface (e.g., particles such as beads) can be varied. In certain aspects, it may be desirable to significantly decrease the volume in which beads and cells are mixed together (e.g., increase the concentration of cells), to ensure maximum contact of cells and beads. For example, in one aspect, a concentration of about 10 billion cells/ml, 9 billion/ml, 8 billion/ml, 7 billion/ml, 6 billion/ml, or 5 billion/ml is used. In one aspect, a concentration of 1 billion cells/ml is used. In one aspect, a concentration of cells from 75, 80, 85, 90, 95, or 100 million cells/ml is used. In further aspects, concentrations of 125 or 150 million cells/ml can be used.

[0773] Using high concentrations can result in increased cell yield, cell activation, and cell expansion. Further, use of high cell concentrations allows more efficient capture of cells that may weakly express target antigens of interest, such as CD28-negative T cells, or from samples where there are many tumor cells present (e.g., leukemic blood, tumor tissue, etc.). Such populations of cells may have therapeutic value and would be desirable to obtain. For example, using high concentration of cells allows more efficient selection of CD8+ T cells that normally have weaker CD28 expression.

[0774] In a related aspect, it may be desirable to use lower concentrations of cells. By significantly diluting the mixture of T cells and surface (e.g., particles such as beads), interactions between the particles and cells is minimized. This selects for cells that express high amounts of desired antigens to be bound to the particles. For example, CD4+ T cells express higher levels of CD28 and are more efficiently captured than CD8+ T cells in dilute concentrations. In one aspect, the concentration of cells used is 5×10⁶/ml. In other aspects, the concentration used can be from about 1×10⁵/ml to 1×10⁶/ml, and any integer value in between.

[0775] In other aspects, the cells may be incubated on a rotator for varying lengths of time at varying speeds at either 2-10° C. or at room temperature.

[0776] T cells for stimulation can also be frozen after a washing step. Wishing not to be bound by theory, the freeze and subsequent thaw step provides a more uniform product by removing granulocytes and to some extent monocytes in the cell population. After the washing step that removes plasma and platelets, the cells may be suspended in a freezing solution. While many freezing solutions and parameters are known in the art and will be useful in this context, one method involves using PBS containing 20% DMSO and 8% human serum albumin, or culture media containing 10% Dextran 40 and 5% Dextrose, 20% Human Serum Albumin and 7.5% DMSO, or 31.25% Plasmalyte-A, 31.25% Dextrose 5%, 0.45% NaCl, 10% Dextran 40 and 5% Dextrose, 20% Human Serum Albumin, and 7.5% DMSO or other suitable cell freezing media containing for example, Hespan and PlasmaLyte A, the cells then are frozen to −80° C. at a rate of 1° per minute and stored in the vapor phase of a liquid nitrogen storage tank. Other methods of controlled freezing may be used as well as uncontrolled freezing immediately at −20° C. or in liquid nitrogen.

[0777] In certain aspects, cryopreserved cells are thawed and washed as described herein and allowed to rest for one hour at room temperature prior to activation using the methods of the present invention.

[0778] Also contemplated in the context of the invention is the collection of blood samples or apheresis product from a subject at a time period prior to when the expanded cells as described herein might be needed. As such, the source of the cells to be expanded can be collected at any time point necessary, and desired cells, such as T cells, isolated and frozen for later use in immune effector cell therapy for any number of diseases or conditions that would benefit from immune effector cell therapy, such as those described herein. In one aspect a blood sample or an apheresis is taken from a generally healthy subject. In certain aspects, a blood sample or an apheresis is taken from a generally healthy subject who is at risk of developing a disease, but who has not yet developed a disease, and the cells of interest are isolated and frozen for later use. In certain aspects, the T cells may be expanded, frozen, and used at a later time. In certain aspects, samples are collected from a patient shortly after diagnosis of a particular disease as described herein but prior to any treatments. In a further aspect, the cells are isolated from a blood sample or an apheresis from a subject prior to any number of relevant treatment modalities, including but not limited to treatment with agents such as natalizumab, efalizumab, antiviral agents, chemotherapy, radiation, immunosuppressive agents, such as cyclosporin, azathioprine, methotrexate, mycophenolate, and FK506, antibodies, or other immunoablative agents such as CAMPATH, anti-CD3 antibodies, cytoxan, fludarabine, cyclosporin, FK506, rapamycin, mycophenolic acid, steroids, FR901228, and irradiation.

[0779] In a further aspect of the present invention, T cells are obtained from a patient directly following treatment that leaves the subject with functional T cells. In this regard, it has been observed that following certain cancer treatments, in particular treatments with drugs that damage the immune system, shortly after treatment during the period when patients would normally be recovering from the treatment, the quality of T cells obtained may be optimal or improved for their ability to expand ex vivo. Likewise, following ex vivo manipulation using the methods described herein, these cells may be in a preferred state for enhanced engraftment and in vivo expansion. Thus, it is contemplated within the context of the present invention to collect blood cells, including T cells, dendritic cells, or other cells of the hematopoietic lineage, during this recovery phase. Further, in certain aspects, mobilization (for example, mobilization with GM-CSF) and conditioning regimens can be used to create a condition in a subject wherein repopulation, recirculation, regeneration, and/or expansion of particular cell types is favored, especially during a defined window of time following therapy. Illustrative cell types include T cells, B cells, dendritic cells, and other cells of the immune system.

[0780] In one embodiment, the immune effector cells expressing a CAR molecule, e.g., a CAR molecule described herein, are obtained from a subject that has received a low, immune enhancing dose of an mTOR inhibitor. In an embodiment, the population of immune effector cells, e.g., T cells, to be engineered to express a CAR, are harvested after a sufficient time, or after sufficient dosing of the low, immune enhancing, dose of an mTOR inhibitor, such that the level of PD1 negative immune effector cells, e.g., T cells, or the ratio of PD1 negative immune effector cells, e.g., T cells/PD1 positive immune effector cells, e.g., T cells, in the subject or harvested from the subject has been, at least transiently, increased.

[0781] In other embodiments, population of immune effector cells, e.g., T cells, which have, or will be engineered to express a CAR, can be treated ex vivo by contact with an amount of an mTOR inhibitor that increases the number of PD1 negative immune effector cells, e.g., T cells or increases the ratio of PD1 negative immune effector cells, e.g., T cells/PD1 positive immune effector cells, e.g., T cells.

[0782] In one embodiment, a T cell population is diacylglycerol kinase (DGK)-deficient. DGK-deficient cells include cells that do not express DGK RNA or protein, or have reduced or inhibited DGK activity. DGK-deficient cells can be generated by genetic approaches, e.g., administering RNA-interfering agents, e.g., siRNA, shRNA, miRNA, to reduce or prevent DGK expression. Alternatively, DGK-deficient cells can be generated by treatment with DGK inhibitors described herein.

[0783] In one embodiment, a T cell population is Ikaros-deficient. Ikaros-deficient cells include cells that do not express Ikaros RNA or protein, or have reduced or inhibited Ikaros activity, Ikaros-deficient cells can be generated by genetic approaches, e.g., administering RNA-interfering agents, e.g., siRNA, shRNA, miRNA, to reduce or prevent Ikaros expression. Alternatively, Ikaros-deficient cells can be generated by treatment with Ikaros inhibitors, e.g., lenalidomide.

[0784] In embodiments, a T cell population is DGK-deficient and Ikaros-deficient, e.g., does not express DGK and Ikaros, or has reduced or inhibited DGK and Ikaros activity. Such DGK and Ikaros-deficient cells can be generated by any of the methods described herein.

[0785] In an embodiment, the NK cells are obtained from the subject. In another embodiment, the NK cells are an NK cell line, e.g., NK-92 cell line (Conkwest).

### Allogeneic CAR

[0786] In embodiments described herein, the immune effector cell can be an allogeneic immune effector cell, e.g., T cell or NK cell. For example, the cell can be an allogeneic T cell, e.g., an allogeneic T cell lacking expression of a functional T cell receptor (TCR) and/or human leukocyte antigen (HLA), e.g., HLA class I and/or HLA class II.

[0787] A T cell lacking a functional TCR can be, e.g., engineered such that it does not express any functional TCR on its surface, engineered such that it does not express one or more subunits that comprise a functional TCR (e.g., engineered such that it does not express (or exhibits reduced expression) of TCR alpha, TCR beta, TCR gamma, TCR delta, TCR epsilon, and/or TCR zeta) or engineered such that it produces very little functional TCR on its surface (e.g., engineered such that it does not express (or exhibits reduced expression) of TCR alpha, TCR beta, TCR gamma, TCR delta, TCR epsilon, and/or TCR zeta). Alternatively, the T cell can express a substantially impaired TCR, e.g., by expression of mutated or truncated forms of one or more of the subunits of the TCR. The term “substantially impaired TCR” means that this TCR will not elicit an adverse immune reaction in a host.

[0788] A T cell described herein can be, e.g., engineered such that it does not express a functional HLA on its surface. For example, a T cell described herein, can be engineered such that cell surface expression HLA, e.g., HLA class 1 and/or HLA class II, is downregulated. In some embodiments, downregulation of HLA may be accomplished by reducing or eliminating expression of beta-2 microglobulin (B2M).

[0789] In some embodiments, the T cell can lack a functional TCR and a functional HLA, e.g., HLA class I and/or HLA class II.

[0790] Modified T cells that lack expression of a functional TCR and/or HLA can be obtained by any suitable means, including a knock out or knock down of one or more subunit of TCR or HLA. For example, the T cell can include a knock down of TCR and/or HLA using siRNA, shRNA, clustered regularly interspaced short palindromic repeats (CRISPR) transcription-activator like effector nuclease (TALEN), or zinc finger endonuclease (ZFN).

[0791] In some embodiments, the allogeneic cell can be a cell which does not express or expresses at low levels an inhibitory molecule, e.g. a cell engineered by any method described herein. For example, the cell can be a cell that does not express or expresses at low levels an inhibitory molecule, e.g., that can decrease the ability of a CAR-expressing cell to mount an immune effector response. Examples of inhibitory molecules include PD1, PD-L1, PD-L2, CTLA4, TIM3, CEACAM (e.g., CEACAM-1, CEACAM-3 and/or CEACAM-5), LAG3, VISTA, BTLA, TIGIT, LAIR1, CD160, 2B4, CD80, CD86, B7-H3 (CD276), B7-H4 (VTCN1), HVEM (TNFRSF14 or CD270), KIR, A2aR, MHC class I, MHC class II, GAL9, adenosine, and TGF (e.g., TGF beta). Inhibition of an inhibitory molecule, e.g., by inhibition at the DNA, RNA or protein level, can optimize a CAR-expressing cell performance. In embodiments, an inhibitory nucleic acid, e.g., an inhibitory nucleic acid, e.g., a dsRNA, e.g., an siRNA or shRNA, a clustered regularly interspaced short palindromic repeats (CRISPR), a transcription-activator like effector nuclease (TALEN), or a zinc finger endonuclease (ZFN), e.g., as described herein, can be used.

siRNA and shRNA to inhibit TCR or HLA

[0792] In some embodiments, TCR expression and/or HLA expression can be inhibited using siRNA or shRNA that targets a nucleic acid encoding a TCR and/or HLA, and/or an inhibitory molecule described herein (e.g., PD1, PD-L1, PD-L2, CTLA4, TIM3, CEACAM (e.g., CEACAM-1, CEACAM-3 and/or CEACAM-5), LAG3, VISTA, BTLA, TIGIT, LAIR1, CD160, 2B4, CD80, CD86, B7-H3 (CD276), B7-H4 (VTCN1), HVEM (TNFRSF14 or CD270), KIR, A2aR, MHC class I, MHC class II, GAL9, adenosine, and TGF beta), in a T cell.

[0793] Expression systems for siRNA and shRNAs, and exemplary shRNAs, are described, e.g., in paragraphs 649 and 650 of International Application WO2015/142675, filed Mar. 13, 2015, which is incorporated by reference in its entirety CRISPR to inhibit TCR or HLA “CRISPR” or “CRISPR to TCR and/or HLA” or “CRISPR to inhibit TCR and/or HLA” as used herein refers to a set of clustered regularly interspaced short palindromic repeats, or a system comprising such a set of repeats. “Cas”, as used herein, refers to a CRISPR-associated protein. A “CRISPR/Cas” system refers to a system derived from CRISPR and Cas which can be used to silence or mutate a TCR and/or HLA gene, and/or an inhibitory molecule described herein (e.g., PD1, PD-L1, PD-L2, CTLA4, TIM3, CEACAM (e.g., CEACAM-1, CEACAM-3 and/or CEACAM-5), LAG3, VISTA, BTLA, TIGIT, LAIR1, CD160, 2B4, CD80, CD86, B7-H3 (CD276), B7-H4 (VTCN1), HVEM (TNFRSF14 or CD270), KIR, A2aR, MHC class I, MHC class II, GAL9, adenosine, and TGF beta).

[0794] The CRISPR/Cas system, and uses thereof, are described, e.g., in paragraphs 651-658 of International Application WO2015/142675, filed Mar. 13, 2015, which is incorporated by reference in its entirety.

TALEN to inhibit TCR and/or HLA

[0795] “TALEN” or “TALEN to HLA and/or TCR” or “TALEN to inhibit HLA and/or TCR” refers to a transcription activator-like effector nuclease, an artificial nuclease which can be used to edit the HLA and/or TCR gene, and/or an inhibitory molecule described herein (e.g., PD1, PD-L1, PD-L2, CTLA4, TIM3, CEACAM (e.g., CEACAM-1, CEACAM-3 and/or CEACAM-5), LAG3, VISTA, BTLA, TIGIT, LAIR1, CD160, 2B4, CD80, CD86, B7-H3 (CD276), B7-H4 (VTCN1), HVEM (TNFRSF14 or CD270), KIR, A2aR, MHC class I, MHC class II, GAL9, adenosine, and TGF beta).

[0796] TALENs, TALEs, and uses thereof, are described, e.g., in paragraphs 659-665 of International Application WO2015/142675, filed Mar. 13, 2015, which is incorporated by reference in its entirety.

Zinc Finger Nuclease to Inhibit HLA and/or TCR

[0797] “ZFN” or “Zinc Finger Nuclease” or “ZFN to HLA and/or TCR” or “ZFN to inhibit HLA and/or TCR” refer to a zinc finger nuclease, an artificial nuclease which can be used to edit the HLA and/or TCR gene, and/or an inhibitory molecule described herein (e.g., PD1, PD-L1, PD-L2, CTLA4, TIM3, CEACAM (e.g., CEACAM-1, CEACAM-3 and/or CEACAM-5), LAG3, VISTA, BTLA, TIGIT, LAIR1, CD160, 2B4, CD80, CD86, B7-H3 (CD276), B7-H4 (VTCN1), HVEM (TNFRSF14 or CD270), KIR, A2aR, MHC class I, MHC class II, GAL9, adenosine, and TGF beta).

[0798] ZFNs, and uses thereof, are described, e.g., in paragraphs 666-671 of International Application WO2015/142675, filed Mar. 13, 2015, which is incorporated by reference in its entirety.

### Telomerase Expression

[0799] While not wishing to be bound by any particular theory, in some embodiments, a therapeutic T cell has short term persistence in a patient, due to shortened telomeres in the T cell; accordingly, transfection with a telomerase gene can lengthen the telomeres of the T cell and improve persistence of the T cell in the patient. See Carl June, “Adoptive T cell therapy for cancer in the clinic”, Journal of Clinical Investigation, 117:1466-1476 (2007). Thus, in an embodiment, an immune effector cell, e.g., a T cell, ectopically expresses a telomerase subunit, e.g., the catalytic subunit of telomerase, e.g., TERT, e.g., hTERT. In some aspects, this disclosure provides a method of producing a CAR-expressing cell, comprising contacting a cell with a nucleic acid encoding a telomerase subunit, e.g., the catalytic subunit of telomerase, e.g., TERT, e.g., hTERT. The cell may be contacted with the nucleic acid before, simultaneous with, or after being contacted with a construct encoding a CAR.

[0800] In one aspect, the disclosure features a method of making a population of immune effector cells (e.g., T cells or NK cells). In an embodiment, the method comprises: providing a population of immune effector cells (e.g., T cells or NK cells), contacting the population of immune effector cells with a nucleic acid encoding a CAR; and contacting the population of immune effector cells with a nucleic acid encoding a telomerase subunit, e.g., hTERT, under conditions that allow for CAR and telomerase expression.

[0801] In an embodiment, the nucleic acid encoding the telomerase subunit is DNA. In an embodiment, the nucleic acid encoding the telomerase subunit comprises a promoter capable of driving expression of the telomerase subunit.

[0802] In an embodiment, hTERT has the amino acid sequence of GenBank™ Protein ID AAC51724.1 (Meyerson et al., “hEST2, the Putative Human Telomerase Catalytic Subunit Gene, Is Up-Regulated in Tumor Cells and during Immortalization” Cell Volume 90, Issue 4, 22 Aug. 1997, Pages 785-795) as disclosed on pages 233-234 of International Application WO 2016/164731, filed Apr. 8, 2016, which is incorporated by reference in its entirety.

[0803] In an embodiment, the hTERT has a sequence at least 80%, 85%, 90%, 95%, 96\hat{ }, 97%, 98%, or 99% identical to the sequence of SEQ ID NO: 1332. In an embodiment, the hTERT has a sequence of SEQ ID NO: 1332. In an embodiment, the hTERT comprises a deletion (e.g., of no more than 5, 10, 15, 20, or 30 amino acids) at the N-terminus, the C-terminus, or both. In an embodiment, the hTERT comprises a transgenic amino acid sequence (e.g., of no more than 5, 10, 15, 20, or 30 amino acids) at the N-terminus, the C-terminus, or both. In an embodiment, the hTERT is encoded by the nucleic acid sequence of GenBank™ Accession No. AF018167 (Meyerson et al., “hEST2, the Putative Human Telomerase Catalytic Subunit Gene, Is Up-Regulated in Tumor Cells and during Immortalization” Cell Volume 90, Issue 4, 22 Aug. 1997, Pages 785-795) as disclosed on pages 234-235 of International Application WO 2016/164731, filed Apr. 8, 2016, which is incorporated by reference in its entirety.

[0804] In an embodiment, the hTERT is encoded by a nucleic acid having a sequence at least 80%, 85%, 90%, 95%, 96, 97%, 98%, or 99% identical to the sequence of SEQ ID NO: 1333. In an embodiment, the hTERT is encoded by a nucleic acid of SEQ ID NO: 1333.

### Activation and Expansion of Immune Effector Cells (e.g., T Cells)

[0805] Immune effector cells such as T cells may be activated and expanded generally using methods as described, for example, in U.S. Pat. Nos. 6,352,694; 6,534,055; 6,905,680; 6,692,964; 5,858,358; 6,887,466; 6,905,681; 7,144,575; 7,067,318; 7,172,869; 7,232,566; 7,175,843; 5,883,223; 6,905,874; 6,797,514; 6,867,041; and U.S. Patent Application Publication No. 20060121005.

[0806] The procedure for ex vivo expansion of hematopoietic stem and progenitor cells is described in U.S. Pat. No. 5,199,942, incorporated herein by reference, can be applied to the cells of the present invention. Other suitable methods are known in the art, therefore the present invention is not limited to any particular method of ex vivo expansion of the cells. Briefly, ex vivo culture and expansion of T cells can comprise: (1) collecting CD34+ hematopoietic stem and progenitor cells from a mammal from peripheral blood harvest or bone marrow explants; and (2) expanding such cells ex vivo. In addition to the cellular growth factors described in U.S. Pat. No. 5,199,942, other factors such as flt3-L, IL-1, IL-3 and c-kit ligand, can be used for culturing and expansion of the cells.

[0807] Generally, a population of immune effector cells may be expanded by contact with a surface having attached thereto an agent that stimulates a CD3/TCR complex associated signal and a ligand that stimulates a costimulatory molecule on the surface of the T cells. In particular, T cell populations may be stimulated as described herein, such as by contact with an anti-CD3 antibody, or antigen-binding fragment thereof, or an anti-CD2 antibody immobilized on a surface, or by contact with a protein kinase C activator (e.g., bryostatin) in conjunction with a calcium ionophore. For co-stimulation of an accessory molecule on the surface of the T cells, a ligand that binds the accessory molecule is used. For example, a population of T cells can be contacted with an anti-CD3 antibody and an anti-CD28 antibody, under conditions appropriate for stimulating proliferation of the T cells. To stimulate proliferation of either CD4+ T cells or CD8+ T cells, an anti-CD3 antibody and an anti-CD28 antibody may be used. Examples of an anti-CD28 antibody include 9.3, B-T3, XR-CD28 (Diaclone, Besangon, France) can be used as can other methods commonly known in the art (Berg et al., Transplant Proc. 30(8):3975-3977, 1998; Haanen et al., J. Exp. Med. 190(9):13191328, 1999; Garland et al., J. Immunol Meth. 227(1-2):53-63, 1999).

[0808] In some embodiments, immune effector cells (such as PBMCs or T cells) are expanded and stimulated by contacting the cells to one or both of an anti-CD3 antibody and IL-2. In embodiments, the cells are expanded without anti-CD3 or anti-CD28 beads.

[0809] In certain aspects, the primary stimulatory signal and the costimulatory signal for the T cell may be provided by different protocols. For example, the agents providing each signal may be in solution or coupled to a surface. When coupled to a surface, the agents may be coupled to the same surface (i.e., in “cis” formation) or to separate surfaces (i.e., in “trans” formation). Alternatively, one agent may be coupled to a surface and the other agent in solution. In one aspect, the agent providing the costimulatory signal is bound to a cell surface and the agent providing the primary activation signal is in solution or coupled to a surface. In certain aspects, both agents can be in solution. In one aspect, the agents may be in soluble form, and then cross-linked to a surface, such as a cell expressing Fc receptors or an antibody or other binding agent which will bind to the agents. In this regard, see for example, U.S. Patent Application Publication Nos. 20040101519 and 20060034810 for artificial antigen presenting cells (aAPCs) that are contemplated for use in activating and expanding T cells in the present invention.

[0810] In one aspect, the two agents are immobilized on beads, either on the same bead, i.e., “cis,” or to separate beads, i.e., “trans.” By way of example, the agent providing the primary activation signal is an anti-CD3 antibody or an antigen-binding fragment thereof and the agent providing the costimulatory signal is an anti-CD28 antibody or antigen-binding fragment thereof; and both agents are co-immobilized to the same bead in equivalent molecular amounts. In one aspect, a 1:1 ratio of each antibody bound to the beads for CD4+ T cell expansion and T cell growth is used. In certain aspects, a ratio of anti CD3:CD28 antibodies bound to the beads is used such that an increase in T cell expansion is observed as compared to the expansion observed using a ratio of 1:1. In one particular aspect an increase of from about 1 to about 3 fold is observed as compared to the expansion observed using a ratio of 1:1. In one aspect, the ratio of CD3:CD28 antibody bound to the beads ranges from 100:1 to 1:100 and all integer values there between. In one aspect, more anti-CD28 antibody is bound to the particles than anti-CD3 antibody, i.e., the ratio of CD3:CD28 is less than one. In certain aspects, the ratio of anti CD28 antibody to anti CD3 antibody bound to the beads is greater than 2:1. In one particular aspect, a 1:100 CD3:CD28 ratio of antibody bound to beads is used. In one aspect, a 1:75 CD3:CD28 ratio of antibody bound to beads is used. In a further aspect, a 1:50 CD3:CD28 ratio of antibody bound to beads is used. In one aspect, a 1:30 CD3:CD28 ratio of antibody bound to beads is used. In one aspect, a 1:10 CD3:CD28 ratio of antibody bound to beads is used. In one aspect, a 1:3 CD3:CD28 ratio of antibody bound to the beads is used. In yet one aspect, a 3:1 CD3:CD28 ratio of antibody bound to the beads is used.

[0811] Ratios of particles to cells from 1:500 to 500:1 and any integer values in between may be used to stimulate T cells or other target cells. As those of ordinary skill in the art can readily appreciate, the ratio of particles to cells may depend on particle size relative to the target cell. For example, small sized beads could only bind a few cells, while larger beads could bind many. In certain aspects the ratio of cells to particles ranges from 1:100 to 100:1 and any integer values in-between and in further aspects the ratio comprises 1:9 to 9:1 and any integer values in between, can also be used to stimulate T cells. The ratio of anti-CD3- and anti-CD28-coupled particles to T cells that result in T cell stimulation can vary as noted above, however certain suitable values include 1:100, 1:50, 1:40, 1:30, 1:20, 1:10, 1:9, 1:8, 1:7, 1:6, 1:5, 1:4, 1:3, 1:2, 1:1, 2:1, 3:1, 4:1, 5:1, 6:1, 7:1, 8:1, 9:1, 10:1, and 15:1 with one suitable ratio being at least 1:1 particles per T cell. In one aspect, a ratio of particles to cells of 1:1 or less is used. In one particular aspect, a suitable particle: cell ratio is 1:5. In further aspects, the ratio of particles to cells can be varied depending on the day of stimulation. For example, in one aspect, the ratio of particles to cells is from 1:1 to 10:1 on the first day and additional particles are added to the cells every day or every other day thereafter for up to 10 days, at final ratios of from 1:1 to 1:10 (based on cell counts on the day of addition). In one particular aspect, the ratio of particles to cells is 1:1 on the first day of stimulation and adjusted to 1:5 on the third and fifth days of stimulation. In one aspect, particles are added on a daily or every other day basis to a final ratio of 1:1 on the first day, and 1:5 on the third and fifth days of stimulation. In one aspect, the ratio of particles to cells is 2:1 on the first day of stimulation and adjusted to 1:10 on the third and fifth days of stimulation. In one aspect, particles are added on a daily or every other day basis to a final ratio of 1:1 on the first day, and 1:10 on the third and fifth days of stimulation. One of skill in the art will appreciate that a variety of other ratios may be suitable for use in the present invention. In particular, ratios will vary depending on particle size and on cell size and type. In one aspect, the most typical ratios for use are in the neighborhood of 1:1, 2:1 and 3:1 on the first day.

[0812] In further aspects of the present invention, the cells, such as T cells, are combined with agent-coated beads, the beads and the cells are subsequently separated, and then the cells are cultured. In an alternative aspect, prior to culture, the agent-coated beads and cells are not separated but are cultured together. In a further aspect, the beads and cells are first concentrated by application of a force, such as a magnetic force, resulting in increased ligation of cell surface markers, thereby inducing cell stimulation.

[0813] By way of example, cell surface proteins may be ligated by allowing paramagnetic beads to which anti-CD3 and anti-CD28 are attached (3×28 beads) to contact the T cells. In one aspect the cells (for example, 10⁴ to 10⁹ T cells) and beads (for example, DYNABEADS® M-450 CD3/CD28 T paramagnetic beads at a ratio of 1:1) are combined in a buffer, for example PBS (without divalent cations such as, calcium and magnesium). Again, those of ordinary skill in the art can readily appreciate any cell concentration may be used. For example, the target cell may be very rare in the sample and comprise only 0.01% of the sample or the entire sample (i.e., 100%) may comprise the target cell of interest. Accordingly, any cell number is within the context of the present invention. In certain aspects, it may be desirable to significantly decrease the volume in which particles and cells are mixed together (i.e., increase the concentration of cells), to ensure maximum contact of cells and particles. For example, in one aspect, a concentration of about 10 billion cells/ml, 9 billion/ml, 8 billion/ml, 7 billion/ml, 6 billion/ml, or 5 billion/ml or 2 billion cells/ml is used. In one aspect, greater than 100 million cells/ml is used. In a further aspect, a concentration of cells of 10, 15, 20, 25, 30, 35, 40, 45, or 50 million cells/ml is used. In yet one aspect, a concentration of cells from 75, 80, 85, 90, 95, or 100 million cells/ml is used. In further aspects, concentrations of 125 or 150 million cells/ml can be used. Using high concentrations can result in increased cell yield, cell activation, and cell expansion. Further, use of high cell concentrations allows more efficient capture of cells that may weakly express target antigens of interest, such as CD28-negative T cells. Such populations of cells may have therapeutic value and would be desirable to obtain in certain aspects. For example, using high concentration of cells allows more efficient selection of CD8+ T cells that normally have weaker CD28 expression.

[0814] In one embodiment, cells transduced with a nucleic acid encoding a CAR, e.g., a CAR described herein, are expanded, e.g., by a method described herein. In one embodiment, the cells are expanded in culture for a period of several hours (e.g., about 2, 3, 4, 5, 6, 7, 8, 9, 10, 15, 18, 21 hours) to about 14 days (e.g., 1, 2, 3, 4, 5, 6, 7, 8, 9, 10, 11, 12, 13 or 14 days). In one embodiment, the cells are expanded for a period of 4 to 9 days. In one embodiment, the cells are expanded for a period of 8 days or less, e.g., 7, 6 or 5 days. In one embodiment, the cells, e.g., a CAR cell described herein, are expanded in culture for 5 days, and the resulting cells are more potent than the same cells expanded in culture for 9 days under the same culture conditions. Potency can be defined, e.g., by various T cell functions, e.g. proliferation, target cell killing, cytokine production, activation, migration, or combinations thereof. In one embodiment, the cells, e.g., a CD19 CAR cell described herein, expanded for 5 days show at least a one, two, three or four fold increase in cells doublings upon antigen stimulation as compared to the same cells expanded in culture for 9 days under the same culture conditions. In one embodiment, the cells, e.g., the cells expressing a CAR described herein, are expanded in culture for 5 days, and the resulting cells exhibit higher proinflammatory cytokine production, e.g., IFN-γ and/or GM-CSF levels, as compared to the same cells expanded in culture for 9 days under the same culture conditions. In one embodiment, the cells, e.g., a CAR cell described herein, expanded for 5 days show at least a one, two, three, four, five, ten fold or more increase in pg/ml of proinflammatory cytokine production, e.g., IFN-γ and/or GM-CSF levels, as compared to the same cells expanded in culture for 9 days under the same culture conditions.

[0815] In one aspect of the present invention, the mixture may be cultured for several hours (about 3 hours) to about 14 days or any hourly integer value in between. In one aspect, the mixture may be cultured for 21 days. In one aspect of the invention the beads and the T cells are cultured together for about eight days. In one aspect, the beads and T cells are cultured together for 2-3 days.

[0816] Several cycles of stimulation may also be desired such that culture time of T cells can be 60 days or more. Conditions appropriate for T cell culture include an appropriate media (e.g., Minimal Essential Media or RPMI Media 1640 or, X-vivo 15, (Lonza)) that may contain factors necessary for proliferation and viability, including serum (e.g., fetal bovine or human serum), interleukin-2 (IL-2), insulin, IFN-γ, IL-4, IL-7, GM-CSF, IL-10, IL-12, IL-15, TGFβ, and TNF-α or any other additives for the growth of cells known to the skilled artisan. Other additives for the growth of cells include, but are not limited to, surfactant, plasmanate, and reducing agents such as N-acetyl-cysteine and 2-mercaptoethanol. Media can include RPMI 1640, AIM-V, DMEM, MEM, α-MEM, F-12, X-Vivo 15, and X-Vivo 20, Optimizer, with added amino acids, sodium pyruvate, and vitamins, either serum-free or supplemented with an appropriate amount of serum (or plasma) or a defined set of hormones, and/or an amount of cytokine(s) sufficient for the growth and expansion of T cells. Antibiotics, e.g., penicillin and streptomycin, are included only in experimental cultures, not in cultures of cells that are to be infused into a subject. The target cells are maintained under conditions necessary to support growth, for example, an appropriate temperature (e.g., 37° C.) and atmosphere (e.g., air plus 5% CO₂).

[0817] In one embodiment, the cells are expanded in an appropriate media (e.g., media described herein) that includes one or more interleukin that result in at least a 200-fold (e.g., 200-fold, 250-fold, 300-fold, 350-fold) increase in cells over a 14 day expansion period, e.g., as measured by a method described herein such as flow cytometry. In one embodiment, the cells are expanded in the presence IL-15 and/or IL-7 (e.g., IL-15 and IL-7).

[0818] In some embodiments a CAR-expressing cell described herein (e.g., a T cell such as a CD4+ T cell or a CD8+ T cell) is contacted with a composition comprising a interleukin-15 (IL-15) polypeptide, a interleukin-15 receptor alpha (IL-15Ra) polypeptide, or a combination of both a IL-15 polypeptide and a IL-15Ra polypeptide e.g., hetIL-15, during the manufacturing of the CAR-expressing cell, e.g., ex vivo. In embodiments, a CAR-expressing cell described herein is contacted with a composition comprising a IL-15 polypeptide during the manufacturing of the CAR-expressing cell, e.g., ex vivo. In embodiments, a CAR-expressing cell described herein is contacted with a composition comprising a combination of both a IL-15 polypeptide and a IL-15 Ra polypeptide during the manufacturing of the CAR-expressing cell, e.g., ex vivo. In embodiments, a CAR-expressing cell described herein is contacted with a composition comprising hetIL-15 during the manufacturing of the CAR-expressing cell, e.g., ex vivo.

[0819] In one embodiment the CAR-expressing cell (e.g., a T cell or NK cell) described herein is contacted with a composition comprising hetIL-15 during ex vivo expansion. In an embodiment, the CAR-expressing cell described herein is contacted with a composition comprising an IL-15 polypeptide during ex vivo expansion. In an embodiment, the CAR-expressing cell described herein is contacted with a composition comprising both an IL-15 polypeptide and an IL-15Ra polypeptide during ex vivo expansion. In one embodiment the contacting results in the survival and proliferation of a lymphocyte subpopulation, e.g., CD8+ T cells.

[0820] In an embodiment, the method of making disclosed herein further comprises contacting the population of immune effector cells (e.g., T cells or NK cells) with a nucleic acid encoding a telomerase subunit, e.g., hTERT. The nucleic acid encoding the telomerase subunit can be DNA.

[0821] T cells that have been exposed to varied stimulation times may exhibit different characteristics. For example, typical blood or apheresed peripheral blood mononuclear cell products have a helper T cell population (TH, CD4+) that is greater than the cytotoxic or suppressor T cell population (TC, CD8+). Ex vivo expansion of T cells by stimulating CD3 and CD28 receptors produces a population of T cells that prior to about days 8-9 consists predominately of TH cells, while after about days 8-9, the population of T cells comprises an increasingly greater population of TC cells. Accordingly, depending on the purpose of treatment, infusing a subject with a T cell population comprising predominately of TH cells may be advantageous. Similarly, if an antigen-specific subset of TC cells has been isolated it may be beneficial to expand this subset to a greater degree.

[0822] Further, in addition to CD4 and CD8 markers, other phenotypic markers vary significantly, but in large part, reproducibly during the course of the cell expansion process. Thus, such reproducibility enables the ability to tailor an activated T cell product for specific purposes.

[0823] Once a CAR, e.g., CD19 CAR is constructed, various assays can be used to evaluate the activity of the molecule, such as but not limited to, the ability to expand T cells following antigen stimulation, sustain T cell expansion in the absence of re-stimulation, and anti-cancer activities in appropriate in vitro and animal models. Assays to evaluate the effects of a CAR, e.g., CD19 CAR are described in further detail below

[0824] Western blot analysis of CAR expression in primary T cells can be used to detect the presence of monomers and dimers, e.g., as described in paragraph 695 of International Application WO2015/142675, filed Mar. 13, 2015, which is herein incorporated by reference in its entirety.

[0825] In vitro expansion of CAR+ T cells following antigen stimulation can be measured by flow cytometry. For example, a mixture of CD4+ and CD8+ T cells are stimulated with αCD3/αCD28 beads followed by transduction with lentiviral vectors expressing GFP under the control of the promoters to be analyzed. Exemplary promoters include the CMV IE gene, EF-1α, ubiquitin C, or phosphoglycerokinase (PGK) promoters. GFP fluorescence is evaluated on day 6 of culture in the CD4+ and/or CD8+ T cell subsets by flow cytometry. See, e.g., Milone et al., Molecular Therapy 17(8): 1453-1464 (2009). Alternatively, a mixture of CD4⁺ and CD8⁺ T cells are stimulated with αCD3/αCD28 coated magnetic beads on day 0, and transduced with CAR on day 1 using a bicistronic lentiviral vector expressing CAR along with eGFP using a 2A ribosomal skipping sequence. Cultures are re-stimulated with either CD19⁺ K562 cells (K562-CD19), wild-type K562 cells (K562 wild type) or K562 cells expressing hCD32 and 4-1BBL in the presence of anti-CD3 and anti-CD28 antibody (K562-BBL-3/28) following washing. Exogenous IL-2 is added to the cultures every other day at 100 IU/ml. GFP⁺ T cells are enumerated by flow cytometry using bead-based counting. See, e.g., Milone et al., Molecular Therapy 17(8): 1453-1464 (2009).

[0826] Sustained CAR⁺ T cell expansion in the absence of re-stimulation can also be measured. See, e.g., Milone et al., Molecular Therapy 17(8): 1453-1464 (2009). Briefly, mean T cell volume (fl) is measured on day 8 of culture using a Coulter Multisizer particle counter, a Nexcelom Cellometer Vision, or Millipore Scepter following stimulation with αCD3/αCD28 coated magnetic beads on day 0, and transduction with the indicated CAR on day 1.

[0827] Animal models can also be used to measure a CAR-expressing cell activity, e.g., as described in paragraph 698 of International Application WO2015/142675, filed Mar. 13, 2015, which is herein incorporated by reference in its entirety.

[0828] Dose dependent CAR treatment response can be evaluated, e.g., as described in paragraph 699 of International Application WO2015/142675, filed Mar. 13, 2015, which is herein incorporated by reference in its entirety. Assessment of cell proliferation and cytokine production has been previously described, e.g., as described in paragraph 700 of International Application WO2015/142675, filed Mar. 13, 2015, which is herein incorporated by reference in its entirety. Cytotoxicity can be assessed by a standard ⁵¹Cr-release assay, e.g., as described in paragraph 701 of International Application WO2015/142675, filed Mar. 13, 2015, which is herein incorporated by reference in its entirety. Imaging technologies can be used to evaluate specific trafficking and proliferation of CARs in tumor-bearing animal models, e.g., as described in paragraph 702 of International Application WO2015/142675, filed Mar. 13, 2015, which is herein incorporated by reference in its entirety.

[0829] Other assays, including those described in the Example section herein as well as those that are known in the art can also be used to evaluate the CARs described herein.

[0830] Alternatively, or in combination to the methods disclosed herein, methods and compositions for one or more of detection and/or quantification of CAR-expressing cells (e.g., in vitro or in vivo (e.g., clinical monitoring)), immune cell expansion and/or activation, and/or CAR-specific selection, that involve the use of a CAR ligand, are disclosed. In one exemplary embodiment, the CAR ligand is an antibody that binds to the CAR molecule, e.g., binds to the extracellular antigen binding domain of CAR (e.g., an antibody that binds to the antigen binding domain, e.g., an anti-idiotypic antibody; or an antibody that binds to a constant region of the extracellular binding domain). In other embodiments, the CAR ligand is a CAR antigen molecule (e.g., a CAR antigen molecule as described herein).

[0831] In one aspect, a method for detecting and/or quantifying CAR-expressing cells is disclosed. For example, the CAR ligand can be used to detect and/or quantify CAR-expressing cells in vitro or in vivo (e.g., clinical monitoring of CAR-expressing cells in a patient, or dosing a patient). The method includes:
[0832] providing the CAR ligand (optionally, a labelled CAR ligand, e.g., a CAR ligand that includes a tag, a bead, a radioactive or fluorescent label);
[0833] acquiring the CAR-expressing cell (e.g., acquiring a sample containing CAR-expressing cells, such as a manufacturing sample or a clinical sample);
[0834] contacting the CAR-expressing cell with the CAR ligand under conditions where binding occurs, thereby detecting the level (e.g., amount) of the CAR-expressing cells present. Binding of the CAR-expressing cell with the CAR ligand can be detected using standard techniques such as FACS, ELISA and the like.

[0835] In another aspect, a method of expanding and/or activating cells (e.g., immune effector cells) is disclosed. The method includes:
[0836] providing a CAR-expressing cell (e.g., a first CAR-expressing cell or a transiently expressing CAR cell);
[0837] contacting said CAR-expressing cell with a CAR ligand, e.g., a CAR ligand as described herein), under conditions where immune cell expansion and/or proliferation occurs, thereby producing the activated and/or expanded cell population.

[0838] In certain embodiments, the CAR ligand is present on (e.g., is immobilized or attached to a substrate, e.g., a non-naturally occurring substrate). In some embodiments, the substrate is a non-cellular substrate. The non-cellular substrate can be a solid support chosen from, e.g., a plate (e.g., a microtiter plate), a membrane (e.g., a nitrocellulose membrane), a matrix, a chip or a bead. In embodiments, the CAR ligand is present in the substrate (e.g., on the substrate surface). The CAR ligand can be immobilized, attached, or associated covalently or non-covalently (e.g., cross-linked) to the substrate. In one embodiment, the CAR ligand is attached (e.g., covalently attached) to a bead. In the aforesaid embodiments, the immune cell population can be expanded in vitro or ex vivo. The method can further include culturing the population of immune cells in the presence of the ligand of the CAR molecule, e.g., using any of the methods described herein.

[0839] In other embodiments, the method of expanding and/or activating the cells further comprises addition of a second stimulatory molecule, e.g., CD28. For example, the CAR ligand and the second stimulatory molecule can be immobilized to a substrate, e.g., one or more beads, thereby providing increased cell expansion and/or activation.

[0840] In other embodiments, a method for selecting or enriching for a CAR expressing cell is provided. The method includes contacting the CAR expressing cell with a CAR ligand as described herein; and selecting the cell on the basis of binding of the CAR ligand. In yet other embodiments, a method for depleting (e.g., reducing and/or killing) a CAR expressing cell is provided. The method includes contacting the CAR expressing cell with a CAR ligand as described herein; and targeting the cell on the basis of binding of the CAR ligand thereby reducing the number, and/or killing, the CAR-expressing cell. In one embodiment, the CAR ligand is coupled to a toxic agent (e.g., a toxin or a cell ablative drug). In another embodiment, the anti-idiotypic antibody can cause effector cell activity, e.g., ADCC or ADC activities.

[0841] Exemplary anti-CAR antibodies that can be used in the methods disclosed herein are described, e.g., in WO 2014/190273 and by Jena et al., “Chimeric Antigen Receptor (CAR)-Specific Monoclonal Antibody to Detect CD19-Specific T cells in Clinical Trials”, PLOS March 2013 8:3 e57838, the contents of which are incorporated by reference. In some aspects and embodiments, the compositions and methods herein are optimized for a specific subset of T cells, e.g., as described in US Serial No. PCT/US2015/043219 filed Jul. 31, 2015, the contents of which are incorporated herein by reference in their entirety. In some embodiments, the optimized subsets of T cells display an enhanced persistence compared to a control T cell, e.g., a T cell of a different type (e.g., CD8+ or CD4+) expressing the same construct.

[0842] In some embodiments, a CD4+ T cell comprises a CAR described herein, which CAR comprises an intracellular signaling domain suitable for (e.g., optimized for, e.g., leading to enhanced persistence in) a CD4+ T cell, e.g., an ICOS domain. In some embodiments, a CD8+ T cell comprises a CAR described herein, which CAR comprises an intracellular signaling domain suitable for (e.g., optimized for, e.g., leading to enhanced persistence of) a CD8+ T cell, e.g., a 4-1BB domain, a CD28 domain, or another costimulatory domain other than an ICOS domain. In some embodiments, the CAR described herein comprises an antigen binding domain described herein, e.g., a CAR comprising an antigen binding domain.

[0843] In an aspect, described herein is a method of treating a subject, e.g., a subject having cancer. The method includes administering to said subject, an effective amount of:
[0844] 1) a CD4+ T cell comprising a CAR (the CARCD4+) comprising:
[0845] an antigen binding domain, e.g., an antigen binding domain described herein;
[0846] a transmembrane domain; and
[0847] an intracellular signaling domain, e.g., a first costimulatory domain, e.g., an ICOS domain; and
[0848] 2) a CD8+ T cell comprising a CAR (the CARCD8+) comprising:
[0849] an antigen binding domain, e.g., an antigen binding domain described herein;
[0850] a transmembrane domain; and
[0851] an intracellular signaling domain, e.g., a second costimulatory domain, e.g., a 4-1BB domain, a CD28 domain, or another costimulatory domain other than an ICOS domain;
[0852] wherein the CARCD4+ and the CARCD8+ differ from one another.

[0853] Optionally, the method further includes administering:
[0854] 3) a second CD8+ T cell comprising a CAR (the second CARCD8+) comprising:
[0855] an antigen binding domain, e.g., an antigen binding domain described herein;
[0856] a transmembrane domain; and
[0857] an intracellular signaling domain, wherein the second CARCD8+ comprises an intracellular signaling domain, e.g., a costimulatory signaling domain, not present on the CARCD8+, and, optionally, does not comprise an ICOS signaling domain.

### Methods of Manufacture/Production

[0858] In some embodiments, the methods disclosed herein further include administering a T cell depleting agent after treatment with the cell (e.g., an immune effector cell as described herein, e.g., an immune effector cell expressing CAR driven by a truncated PGK1 promoter), thereby reducing (e.g., depleting) the CAR-expressing cells (e.g., the CD19CAR-expressing cells). Such T cell depleting agents can be used to effectively deplete CAR-expressing cells (e.g., CD19CAR-expressing cells) to mitigate toxicity. In some embodiments, the CAR-expressing cells were manufactured according to a method herein, e.g., assayed (e.g., before or after transfection or transduction) according to a method herein.

[0859] In some embodiments, the T cell depleting agent is administered one, two, three, four, or five weeks after administration of the cell, e.g., the population of immune effector cells, described herein.

[0860] In one embodiment, the T cell depleting agent is an agent that depletes CAR-expressing cells, e.g., by inducing antibody dependent cell-mediated cytotoxicity (ADCC) and/or complement-induced cell death. For example, CAR-expressing cells described herein may also express an antigen (e.g., a target antigen) that is recognized by molecules capable of inducing cell death, e.g., ADCC or complement-induced cell death. For example, CAR expressing cells described herein may also express a target protein (e.g., a receptor) capable of being targeted by an antibody or antibody fragment. Examples of such target proteins include, but are not limited to, EpCAM, VEGFR, integrins (e.g., integrins αvβ3, α4, αI¾β3, α4β7, α5β1, αvβ3, αv), members of the TNF receptor superfamily (e.g., TRAIL-R1, TRAIL-R2), PDGF Receptor, interferon receptor, folate receptor, GPNMB, ICAM-1, HLA-DR, CEA, CA-125, MUC1, TAG-72, IL-6 receptor, 5T4, GD2, GD3, CD2, CD3, CD4, CD5, CD11, CD11a/LFA-1, CD15, CD18/ITGB2, CD19, CD20, CD22, CD23/lgE Receptor, CD25, CD28, CD30, CD33, CD38, CD40, CD41, CD44, CD51, CD52, CD62L, CD74, CD80, CD125, CD147/basigin, CD152/CTLA-4, CD154/CD40L, CD195/CCR5, CD319/SLAMF7, and EGFR, and truncated versions thereof (e.g., versions preserving one or more extracellular epitopes but lacking one or more regions within the cytoplasmic domain).

[0861] In some embodiments, the CAR expressing cell co-expresses the CAR and the target protein, e.g., naturally expresses the target protein or is engineered to express the target protein. For example, the cell, e.g., the population of immune effector cells, can include a nucleic acid (e.g., vector) comprising the CAR nucleic acid (e.g., a CAR nucleic acid as described herein) and a nucleic acid encoding the target protein.

[0862] In one embodiment, the T cell depleting agent is a CD52 inhibitor, e.g., an anti-CD52 antibody molecule, e.g., alemtuzumab.

[0863] In other embodiments, the cell, e.g., the population of immune effector cells, expresses a CAR molecule as described herein (e.g., CD19CAR) and the target protein recognized by the T cell depleting agent. In one embodiment, the target protein is CD20. In embodiments where the target protein is CD20, the T cell depleting agent is an anti-CD20 antibody, e.g., rituximab.

[0864] In further embodiments of any of the aforesaid methods, the methods further include transplanting a cell, e.g., a hematopoietic stem cell, or a bone marrow, into the mammal.

[0865] In another aspect, the invention features a method of conditioning a mammal prior to cell transplantation. The method includes administering to the mammal an effective amount of the cell comprising a CAR nucleic acid or polypeptide, e.g., a CD19 CAR nucleic acid or polypeptide. In some embodiments, the cell transplantation is a stem cell transplantation, e.g., a hematopoietic stem cell transplantation, or a bone marrow transplantation. In other embodiments, conditioning a subject prior to cell transplantation includes reducing the number of target-expressing cells in a subject, e.g., CD19-expressing normal cells or CD19-expressing cancer cells.

### Biopolymer Delivery Methods

[0866] In some embodiments, one or more CAR-expressing cells as disclosed herein can be administered or delivered to the subject via a biopolymer scaffold, e.g., a biopolymer implant. Biopolymer scaffolds can support or enhance the delivery, expansion, and/or dispersion of the CAR-expressing cells described herein. A biopolymer scaffold comprises a biocompatible (e.g., does not substantially induce an inflammatory or immune response) and/or a biodegradable polymer that can be naturally occurring or synthetic. Exemplary biopolymers are described, e.g., in paragraphs 1004-1006 of International Application WO2015/142675, filed Mar. 13, 2015, which is herein incorporated by reference in its entirety.

### Therapeutic Applications

CD19 Associated Diseases and/or Disorders

[0867] In one aspect, the invention provides methods for treating a disease associated with CD19 expression. In one aspect, the invention provides methods for treating a disease wherein part of the cancer is negative for CD19 and part of the cancer is positive for CD19. For example, the methods and compositions of the invention are useful for treating subjects that have undergone treatment for a disease associated with expression of CD19, wherein the subject that has undergone treatment related to CD19 expression, e.g., treatment with a CD19 CAR, exhibits a disease associated with expression of CD19.

[0868] In another aspect, the invention provides methods for treating a disease associated with expression of a B-cell antigen, e.g., one or more of CD10, CD20, CD22, CD34, CD123, FLT-3, or ROR1. In one aspect, the invention provides methods for treating a disease wherein part of the tumor is negative for the B-cell antigen and part of the tumor is positive for B-cell antigen. For example, the compositions and methods of the invention are useful for treating subjects that have undergone treatment for a disease associated with expression of the B-cell antigen, wherein the subject that has undergone treatment related to expression of a B-cell antigen, e.g., treatment with a CAR targeting a B-cell antigen, exhibits a disease associated with expression of the B-cell antigen. In a third aspect, the invention provides methods for treating a disease associated with expression of the B-cell antigen, e.g., associated with the expression of CD19 and one or more other B-cell antigens.

[0869] In one aspect, the invention pertains to a vector comprising CD19 CAR operably linked to promoter for expression in mammalian cells, e.g., T cells or NK cells. In one aspect, the invention provides a recombinant cell, e.g., a T cell or NK cell, expressing the CD19 CAR for use in treating CD19-expressing cancers, wherein the recombinant T cell expressing the CD19 CAR is termed a CD19 CART. In one aspect, the CD19 CART described herein, is capable of contacting a cancer cell with at least one CD19 CAR expressed on its surface such that the CART targets the cancer cell and growth of the cancer is inhibited.

[0870] In one aspect, the invention pertains to a method of inhibiting growth of a CD19-expressing cancer cell, comprising contacting the cancer cell with a CD19 CAR expressing cell, e.g., a CD19 CART cell, described, and one or more other CAR expressing cells, e.g., as described herein, such that the CART is activated in response to the antigen and targets the cancer cell, wherein the growth of the cancer is inhibited. The CD19 CAR-expressing cell, e.g., T cell, is administered in combination with a B-cell inhibitor, e.g., a B-cell inhibitor described herein.

[0871] In an aspect, the disclosure provides one or more B-cell inhibitors, wherein the B-cell inhibitor comprises an inhibitor of one or more of CD10, CD20, CD22, CD34, CD123, FLT-3, ROR1, CD79b, CD179b, or CD79a, for use in the treatment of a subject having a disease associated with expression of CD19, and wherein said subject has received, is receiving or is about to receive a cell that expresses a CAR molecule that binds CD19, e.g., a CD19 CAR.

[0872] In some embodiments, the CD19 inhibitor (e.g., one or more cells that express a CAR molecule that binds CD19, e.g., a CAR molecule that binds CD19 described herein) and the B cell inhibitor (e.g., one or more inhibitors of CD10, CD19, CD20, CD22, CD34, CD123, FLT-3, or ROR1, e.g., as described herein) are administered simultaneously. In some embodiments, the CD19 inhibitor and the B cell inhibitor are infused into a subject simultaneously, e.g., are admixed in the same infusion volume. In other embodiments, the simultaneous administration comprises separate administration of the CD19 inhibitor and the B cell inhibitor, e.g., administration of each is initiated within a predetermined time interval (e.g., within 15, 30, or 45 minutes of each other).

[0873] In some embodiments, the start of CD19 inhibitor delivery and the start of B cell inhibitor delivery are within 1, 2, 3, 4, 6, 12, 18, or 24 hours of each other, or within 1, 2, 3, 4, 5, 10, 15, 20, 25, 30, 35, 40, 60, 80, or 100 days of each other. In some embodiments, the end of CD19 inhibitor delivery and the end of B cell inhibitor delivery are within 1, 2, 3, 4, 6, 12, 18, or 24 hours of each other, or within 1, 2, 3, 4, 5, 10, 15, 20, 25, 30, 35, 40, 60, 80, or 100 days of each other. In some embodiments, the overlap in terms of administration between the CD19 inhibitor delivery (e.g., infusion) and the end of B cell inhibitor delivery (e.g., infusion) is at least 1, 2, 3, 4, 5, 10, 15, 20, 25, 30, or 45 minutes.

[0874] In some embodiments, the B cell inhibitor is administered while the one or more cells that express a CAR molecule that binds CD19 are present (e.g., undergoing expansion) in the subject. In some embodiments, the CD19 inhibitor is administered while the one or more cells that express a CAR molecule that binds one or more of CD10, CD20, CD22, CD34, CD123, FLT-3, ROR1, CD79b, CD179b, or CD79a are present (e.g., undergoing expansion) in the subject.

[0875] The invention includes (among other things) a type of cellular therapy where T cells are genetically modified to express a chimeric antigen receptor (CAR) and the CAR T cell is infused to a recipient in need thereof. The infused cell is able to kill tumor cells in the recipient. Unlike antibody therapies, CAR-modified T cells are able to replicate in vivo resulting in long-term persistence that can lead to sustained tumor control. In various aspects, the T cells administered to the patient, or their progeny, persist in the patient for at least four months, five months, six months, seven months, eight months, nine months, ten months, eleven months, twelve months, thirteen months, fourteen month, fifteen months, sixteen months, seventeen months, eighteen months, nineteen months, twenty months, twenty-one months, twenty-two months, twenty-three months, two years, three years, four years, or five years after administration of the T cell to the patient.

[0876] The invention also includes a type of cellular therapy where immune effector cells, e.g., NK cells or T cells are modified, e.g., by in vitro transcribed RNA, to transiently express a chimeric antigen receptor (CAR) and the CAR-expressing (e.g., CAR T) cell is infused to a recipient in need thereof. The infused cell is able to kill cancer cells in the recipient. Thus, in various aspects, the CAR-expressing cells, e.g., T cells, administered to the patient, is present for less than one month, e.g., three weeks, two weeks, one week, after administration of the CAR-expressing cell, e.g., T cell, to the patient.

[0877] Without wishing to be bound by any particular theory, the anti-cancer immunity response elicited by the CAR-modified T cells may be an active or a passive immune response, or alternatively may be due to a direct vs indirect immune response. In one aspect, the CAR (e.g., CD19-CAR) transduced T cells exhibit specific proinflammatory cytokine secretion and potent cytolytic activity in response to human cancer cells expressing the target antigen (e.g., CD19), resist soluble target antigen inhibition, mediate bystander killing and mediate regression of an established human cancer. For example, antigen-less cancer cells within a heterogeneous field of target antigen-expressing cancer may be susceptible to indirect destruction by target antigen-redirected T cells that has previously reacted against adjacent antigen-positive cancer cells.

[0878] In one aspect, the CAR-modified cells of the invention, e.g., fully human CAR T cells, may be a type of vaccine for ex vivo immunization and/or in vivo therapy in a mammal. In one aspect, the mammal is a human.

[0879] With respect to ex vivo immunization, at least one of the following occurs in vitro prior to administering the cell into a mammal: i) expansion of the cells, ii) introducing a nucleic acid encoding a CAR to the cells or iii) cryopreservation of the cells.

[0880] Ex vivo procedures are well known in the art and are discussed more fully below. Briefly, cells are isolated from a mammal (e.g., a human) and genetically modified (i.e., transduced or transfected in vitro) with a vector expressing a CAR disclosed herein. The CAR-modified cell can be administered to a mammalian recipient to provide a therapeutic benefit. The mammalian recipient may be a human and the CAR-modified cell can be autologous with respect to the recipient. Alternatively, the cells can be allogeneic, syngeneic or xenogeneic with respect to the recipient.

[0881] The procedure for ex vivo expansion of hematopoietic stem and progenitor cells is described in U.S. Pat. No. 5,199,942, incorporated herein by reference, can be applied to the cells of the present invention. Other suitable methods are known in the art, therefore the present invention is not limited to any particular method of ex vivo expansion of the cells. Briefly, ex vivo culture and expansion of T cells can comprise: (1) collecting CD34+ hematopoietic stem and progenitor cells from a mammal from peripheral blood harvest or bone marrow explants; and (2) expanding such cells ex vivo. In addition to the cellular growth factors described in U.S. Pat. No. 5,199,942, other factors such as flt3-L, IL-1, IL-3 and c-kit ligand, can be used for culturing and expansion of the cells.

[0882] In addition to using a cell-based vaccine in terms of ex vivo immunization, also included in the methods described herein are compositions and methods for in vivo immunization to elicit an immune response directed against an antigen in a patient.

[0883] Generally, the cells activated and expanded as described herein may be utilized in the treatment and prevention of diseases that arise in individuals who are immunocompromised. In particular, the CAR-expressing cells described herein are used in the treatment of diseases, disorders and conditions associated with expression of one or more B-cell antigen. In certain aspects, the cells are used in the treatment of patients at risk for developing diseases, disorders and conditions associated with expression of one or more B-cell antigen. Thus, the present invention provides (among other things) methods for the treatment or prevention of diseases, disorders and conditions associated with expression of a B-cell antigen comprising administering to a subject in need thereof, a therapeutically effective amount of the CD19 CAR-expressing cells described herein, in combination with one or more of B-cell inhibitor described herein.

[0884] In one embodiment, the therapy described herein (e.g., a CD19 CAR therapy, or a combination of the B-cell inhibitor and the cells expressing a CD19 CAR molecule, e.g., a CD19 CAR molecule described herein) are administered as a first line treatment for the disease, e.g., the cancer, e.g., the cancer described herein. In another embodiment, the therapy described herein (e.g., a CD19 CAR therapy, or a combination of the B-cell inhibitor and the cells expressing a CD19 CAR molecule, e.g., a CD19 CAR molecule described herein) are administered as a second, third, fourth line treatment for the disease, e.g., the cancer, e.g., the cancer described herein.

[0885] In an embodiment, the method further comprises administering a CD19 inhibitor, e.g., a CD19 CAR-expressing cell. In an embodiment, the CD19 inhibitor comprises a CD19 CAR and the B-cell inhibitor comprises a CD123 CAR. In an embodiment, the CD19 CAR or CD123 CAR comprises a split intracellular signaling domain such that full activation of the cell, e.g., the population of immune effector cells, occurs when both the CD19 CAR and CD123 CAR bind to a target cell, e.g., a target CD19+CD123+ cell (e.g., a B-ALL blast cell), compared to activation when the CD19 CAR and CD123 CAR bind to a target cell that expresses one of CD19 or CD123 (e.g., a hematopoietic stem cell). In an embodiment, the CD123CAR comprises a 4-1BB signaling domain and the CD19 CAR comprises a CD3 zeta signaling domain. In an embodiment, the CD123CAR comprises a costimulatory domain, e.g., a 4-1BB signaling domain, and the CD19 CAR comprises a primary signaling domain, e.g., a CD3 zeta signaling domain. In an embodiment, the CD123CAR comprises a primary signaling domain, e.g., a CD3 zeta signaling domain, and the CD19 CAR comprises a costimulatory domain, e.g., a 4-1BB signaling domain. In an embodiment, the B cell inhibitor comprises a CAR (e.g., a CAR directed against CD10, CD20, CD22, CD34, CD123, FLT-3, ROR1, CD79b, CD179b, or CD79a) which comprises a costimulatory domain, and the CD19 CAR comprises a primary signaling domain. In an embodiment, the B cell inhibitor comprises a CAR (e.g., a CAR directed against CD10, CD20, CD22, CD34, CD123, FLT-3, ROR1, CD79b, CD179b, or CD79a) which comprises a primary signalling domain, and the CD19 CAR comprises a costimulatory domain. In an embodiment, the B-cell inhibitor comprises one or more cells that express a CAR molecule that binds CD123, and wherein a CD19 CAR-expressing cell is administered simultaneously with the B-cell inhibitor. In an embodiment, the CD123CAR comprises a 4-1BB signaling domain and the CD19 CAR comprises a CD3 zeta signaling domain.

[0886] The present invention also provides methods for inhibiting the proliferation or reducing a CD19-expressing cell population, the methods comprising contacting a population of cells comprising a CD19-expressing cell with an anti-CD19 CAR-expressing cell described herein that binds to the CD19-expressing cell, and contacting the population of CD19-expressing cells with one or more of a B-cell inhibitor described herein. In a specific aspect, the present invention provides methods for inhibiting the proliferation or reducing the population of cancer cells expressing CD19, the methods comprising contacting the CD19-expressing cancer cell population with an anti-CD19 CAR-expressing cell described herein that binds to the CD19-expressing cell, and contacting the CD19-expressing cell with one or more B-cell described herein. In one aspect, the present invention provides methods for inhibiting the proliferation or reducing the population of cancer cells expressing CD19, the methods comprising contacting the CD19-expressing cancer cell population with an anti-CD19 CAR-expressing cell described herein that binds to the CD19-expressing cell and contacting the CD19-expressing cell with one or more B-cell described herein. In certain aspects, the combination of the anti-CD19 CAR-expressing cell described herein and one or more B-cell described herein reduces the quantity, number, amount or percentage of cells and/or cancer cells by at least 25%, at least 30%, at least 40%, at least 50%, at least 65%, at least 75%, at least 85%, at least 95%, or at least 99% in a subject with or animal model for a hematological cancer or another cancer associated with CD19-expressing cells relative to a negative control. In one aspect, the subject is a human.

[0887] The present invention also provides methods for inhibiting the proliferation or reducing a cell population comprising CD19-expressing cells and cells expressing a second B-cell antigen. In one aspect, CD19 and second B-cell antigen are expressed by the same cells within the population. In another aspect, CD19 and second B-cell antigen are expressed by distinct subsets of cells within the population. In another aspect, CD19 and second B-cell antigen are expressed by overlapping subsets of cells within the population, such that some cells express CD19 and second B-cell antigen, some cells express CD19, and some cells express the second B-cell antigen.

[0888] The present invention also provides methods for inhibiting the proliferation or reducing a cell population expressing CD19 and a second B-cell antigen, the methods comprising (i) contacting a population of cells comprising a CD19-expressing cell with an anti-CD19 CAR-expressing cell described herein that binds to the CD19-expressing cell, and (ii) contacting the second B-cell antigen-expressing cell with a second CAR-expressing cell described herein that binds to the second B-cell antigen-expressing cell. In a specific aspect, the present invention provides methods for inhibiting the proliferation or reducing the population of cancer cells expressing CD19 and a second B-cell antigen, the methods comprising (i) contacting the CD19-expressing cancer cell population with an anti-CD19 CAR-expressing cell described herein that binds to the CD19-expressing cell, and (ii) contacting the second B-cell antigen-expressing cell population with a second CAR-expressing cell described herein that binds to the cell expressing the second B-cell antigen. In one aspect, the present invention provides methods for inhibiting the proliferation or reducing the population of cancer cells expressing CD19 and/or a second B-cell antigen, the methods comprising (i) contacting the CD19-expressing cancer cell population with an anti-CD19 CAR-expressing cell described herein that binds to the CD19-expressing cell and (ii) contacting the second B-cell antigen-expressing cell population with a second CAR-expressing cell described herein that binds to the cell expressing the second B-cell antigen. In certain aspects, the combination of the anti-CD19 CAR-expressing cell described herein and the second CAR-expressing cell described herein, reduces the quantity, number, amount or percentage of cells and/or cancer cells by at least 25%, at least 30%, at least 40%, at least 50%, at least 65%, at least 75%, at least 85%, at least 95%, or at least 99% in a subject with or animal model for a hematological cancer or another cancer associated with CD19 and/or second B-cell antigen-expressing cells relative to a negative control. In one aspect, the subject is a human.

[0889] The present invention also provides methods for preventing, treating and/or managing a disease associated with CD19-expressing cells (e.g., a hematologic cancer or atypical cancer expressing CD19), the methods comprising administering to a subject in need an anti-CD19 CAR-expressing cell that binds to the CD19-expressing cell and administering one or B-cell inhibitor described herein. In one aspect, the subject is a human. Non-limiting examples of disorders associated with CD19-expressing cells include autoimmune disorders (such as lupus), inflammatory disorders (such as allergies and asthma) and cancers (such as hematological cancers or atypical cancers expressing CD19).

[0890] The present invention also provides methods for preventing, treating and/or managing a disease associated with CD19 and/or a second B-cell antigen-expressing cells (e.g., a hematologic cancer or atypical cancer expressing CD19 and/or second B-cell antigen), the methods comprising administering to a subject in need an anti-CD19 CAR-expressing cell that binds to the CD19-expressing cell and a B-cell inhibitor.

[0891] The present invention also provides methods for preventing, treating and/or managing a disease associated with CD19-expressing cells, the methods comprising administering to a subject in need an anti-CD19 CART cell of the invention that binds to the CD19-expressing cell. In one aspect, the subject is a human.

[0892] The present invention also provides methods for preventing relapse of cancer associated with CD19-expressing cells, the methods comprising administering to a subject in need thereof an anti-CD19 CART cell of the invention that binds to the CD19-expressing cell. In one aspect, the methods comprise administering to the subject in need thereof an effective amount of an anti-CD19 CART cell described herein that binds to the CD19-expressing cell in combination with an effective amount of another therapy.

[0893] In one aspect, the invention pertains to a method of treating cancer in a subject. The method comprises administering to the subject a CD19 CAR-expressing cell, e.g., T cell, described herein, in combination with a B-cell inhibitor, such that the cancer is treated in the subject. An example of a cancer that is treatable by the methods described herein is a cancer associated with expression of CD19. In one embodiment, the disease is a solid or liquid tumor. In one embodiment, the disease is a hematologic cancer, e.g., as described herein.

[0894] Non-cancer related indications associated with expression of CD19 include, but are not limited to, e.g., autoimmune disease, (e.g., lupus), inflammatory disorders (allergy and asthma) and transplantation.

[0895] In one aspect, the CAR of the invention can be used to eradicate CD19-expressing normal cells, thereby applicable for use as a cellular conditioning therapy prior to cell transplantation. In one aspect, the CD19-expressing normal cell is a CD19-expressing normal stem cell and the cell transplantation is a stem cell transplantation.

[0896] In some embodiments, a cancer that can be treated with the combination described herein is multiple myeloma. Multiple myeloma is a cancer of the blood, characterized by accumulation of a plasma cell clone in the bone marrow. Current therapies for multiple myeloma include, but are not limited to, treatment with lenalidomide, which is an analog of thalidomide. Lenalidomide has activities which include anti-tumor activity, angiogenesis inhibition, and immunomodulation. In some embodiments, a CD19 CAR, e.g., as described herein, may be used to target myeloma cells. In some embodiments, the combination described herein can be used with one or more additional therapies, e.g., lenalidomide treatment.

[0897] The CAR-expressing cells described herein may be administered either alone, or as a pharmaceutical composition in combination with diluents and/or with other components such as IL-2 or other cytokines or cell populations.

### Hematologic Cancers

[0898] Hematological cancer conditions are the types of cancer such as leukemia, lymphoma and malignant lymphoproliferative conditions that affect blood, bone marrow and the lymphatic system.

[0899] In one embodiment, the hematologic cancer is leukemia. In one embodiment, the cancer is selected from the group consisting of one or more acute leukemias including but not limited to B-cell acute lymphoblastic leukemia (BALL), T-cell acute lymphoblastic leukemia (TALL), small lymphocytic leukemia (SLL), acute lymphoblastic leukemia (ALL); one or more chronic leukemias including but not limited to chronic myelogenous leukemia (CML), chronic lymphocytic leukemia (CLL); additional hematologic cancers or hematologic conditions including, but not limited to mantle cell lymphoma (MCL), B cell prolymphocytic leukemia, blastic plasmacytoid dendritic cell neoplasm, Burkitt's lymphoma, diffuse large B cell lymphoma, follicular lymphoma, hairy cell leukemia, small cell- or a large cell-follicular lymphoma, malignant lymphoproliferative conditions, MALT lymphoma, Marginal zone lymphoma, multiple myeloma, myelodysplasia and myelodysplastic syndrome, non-Hodgkin lymphoma, Hodgkin lymphoma, plasmablastic lymphoma, plasmacytoid dendritic cell neoplasm, Waldenstrom macroglobulinemia, and “preleukemia” which are a diverse collection of hematological conditions united by ineffective production (or dysplasia) of myeloid blood cells. Diseases associated with CD19, CD20, or CD22 expression include, but not limited to atypical and/or non-classical cancers, malignancies, precancerous conditions or proliferative diseases expressing CD19, CD20, or CD22; and any combination thereof.

[0900] Leukemia can be classified as acute leukemia and chronic leukemia. Acute leukemia can be further classified as acute myelogenous leukemia (AML) and acute lymphoblastic leukemia (ALL). Chronic leukemia includes chronic myelogenous leukemia (CML) and chronic lymphocytic leukemia (CLL). Other related conditions include myelodysplastic syndromes (MDS, formerly known as “preleukemia”) which are a diverse collection of hematological conditions united by ineffective production (or dysplasia) of myeloid blood cells and risk of transformation to AML.

[0901] Lymphoma is a group of blood cell tumors that develop from lymphocytes. Exemplary lymphomas include non-Hodgkin lymphoma and Hodgkin lymphoma.

[0902] In an aspect, the invention pertains to a method of treating a mammal having Hodgkin lymphoma, comprising administering to the mammal an effective amount of the cells expressing a CD19 CAR molecule, e.g., a CD19 CAR molecule described herein and a B-cell inhibitor.

[0903] In one aspect, the compositions and CART cells or CAR expressing NK cells of the present invention are particularly useful for treating B cell malignancies, such as non-Hodgkin lymphomas, e.g., DLBCL, Follicular lymphoma, or CLL.

[0904] Non-Hodgkin lymphoma (NHL) is a group of cancers of lymphocytes, formed from either B or T cells. NHLs occur at any age and are often characterized by lymph nodes that are larger than normal, weight loss, and fever. Different types of NHLs are categorized as aggressive (fast-growing) and indolent (slow-growing) types. B-cell non-Hodgkin lymphomas include Burkitt lymphoma, chronic lymphocytic leukemia/small lymphocytic lymphoma (CLL/SLL), diffuse large B-cell lymphoma (DLBCL), follicular lymphoma, immunoblastic large cell lymphoma, precursor B-lymphoblastic lymphoma, and mantle cell lymphoma. Examples of T-cell non-Hodgkin lymphomas include mycosis fungoides, anaplastic large cell lymphoma, and precursor T-lymphoblastic lymphoma. Lymphomas that occur after bone marrow or stem cell transplantation are typically B-cell non-Hodgkin lymphomas. See, e.g., Maloney. NEJM. 366.21(2012):2008-16.

[0905] Diffuse large B-cell lymphoma (DLBCL) is a form of NHL that develops from B cells. DLBCL is an aggressive lymphoma that can arise in lymph nodes or outside of the lymphatic system, e.g., in the gastrointestinal tract, testes, thyroid, skin, breast, bone, or brain. Three variants of cellular morphology are commonly observed in DLBCL: centroblastic, immunoblastic, and anaplastic. Centroblastic morphology is most common and has the appearance of medium-to-large-sized lymphocytes with minimal cytoplasm. There are several subtypes of DLBCL. For example, primary central nervous system lymphoma is a type of DLBCL that only affects the brain is called and is treated differently than DLBCL that affects areas outside of the brain. Another type of DLBCL is primary mediastinal B-cell lymphoma, which often occurs in younger patients and grows rapidly in the chest. Symptoms of DLBCL include a painless rapid swelling in the neck, armpit, or groin, which is caused by enlarged lymph nodes. For some subjects, the swelling may be painful. Other symptoms of DLBCL include night sweats, unexplained fevers, and weight loss. Although most patients with DLBCL are adults, this disease sometimes occurs in children. Treatment for DLBCL includes chemotherapy (e.g., cyclophosphamide, doxorubicin, vincristine, prednisone, etoposide), antibodies (e.g., Rituxan), radiation, or stem cell transplants.

[0906] Follicular lymphoma a type of non-Hodgkin lymphoma and is a lymphoma of follicle center B-cells (centrocytes and centroblasts), which has at least a partially follicular pattern. Follicular lymphoma cells express the B-cell markers CD10, CD19, CD20, and CD22. Follicular lymphoma cells are commonly negative for CD5. Morphologically, a follicular lymphoma tumor is made up of follicles containing a mixture of centrocytes (also called cleaved follicle center cells or small cells) and centroblasts (also called large noncleaved follicle center cells or large cells). The follicles are surrounded by non-malignant cells, mostly T-cells. The follicles contain predominantly centrocytes with a minority of centroblasts. The World Health Organization (WHO) morphologically grades the disease as follows: grade 1 (<5 centroblasts per high-power field (hpf); grade 2 (6-15 centroblasts/hpf); grade 3 (>15 centroblasts/hpf). Grade 3 is further subdivided into the following grades: grade 3A (centrocytes still present); grade 3B (the follicles consist almost entirely of centroblasts). Treatment of follicular lymphoma includes chemotherapy, e.g., alkyating agents, nucleoside analogs, anthracycline-containing regimens, e.g., a combination therapy called CHOP cyclophosphamide, doxorubicin, vincristine, prednisone/prednisolone, antibodies (e.g., rituximab), radioimmunotherapy, and hematopoietic stem cell transplantation.

[0907] CLL is a B-cell malignancy characterized by neoplastic cell proliferation and accumulation in bone morrow, blood, lymph nodes, and the spleen. The median age at time of diagnosis of CLL is about 65 years. Current treatments include chemotherapy, radiation therapy, biological therapy, or bone marrow transplantation. Sometimes symptoms are treated surgically (e.g., splenectomy removal of enlarged spleen) or by radiation therapy (e.g., de-bulking swollen lymph nodes). Chemotherapeutic agents to treat CLL include, e.g., fludarabine, 2-chlorodeoxyadenosine (cladribine), chlorambucil, vincristine, pentostatin, cyclophosphamide, alemtuzumab (Campath-1H), doxorubicin, and prednisone. Biological therapy for CLL includes antibodies, e.g., alemtuzumab, rituximab, and ofatumumab; as well as tyrosine kinase inhibitor therapies. A number of criteria can be used to classify stage of CLL, e.g., the Rai or Binet system. The Rai system describes CLL has having five stages: stage 0 where only lymphocytosis is present; stage I where lymphadenopathy is present; stage II where splenomegaly, lymphadenopathy, or both are present; stage III where anemia, organomegaly, or both are present (progression is defined by weight loss, fatigue, fever, massive organomegaly, and a rapidly increasing lymphocyte count); and stage IV where anemia, thrombocytopenia, organomegaly, or a combination thereof are present. Under the Binet staging system, there are three categories: stage A where lymphocytosis is present and less than three lymph nodes are enlarged (this stage is inclusive of all Rai stage 0 patients, one-half of Rai stage I patients, and one-third of Rai stage II patients); stage B where three or more lymph nodes are involved; and stage C wherein anemia or thrombocytopenia, or both are present. These classification systems can be combined with measurements of mutation of the immunoglobulin genes to provide a more accurate characterization of the state of the disease. The presence of mutated immunoglobulin genes correlates to improved prognosis.

[0908] In another embodiment, the CAR expressing cells of the present invention are used to treat cancers or leukemias, e.g., with leukemia stem cells. For example, the leukemia stem cells are CD34⁺/CD38⁻ leukemia cells.

[0909] In some embodiments, a CAR-expressing cell (e.g., CD19 CAR-expressing cell) described herein is used to deplete a B cell (e.g., a population of B cells, e.g., regulatory B cells). Without wishing to be bound by theory, it is believed that depletion of B cells, e.g., regulatory B cells, can improve the tumor microenvironment such that anti-cancer therapies (e.g., therapies described herein) can be more effective (e.g., than without depletion of the B cells). Thus, provided herein is a method for reducing, e.g., depleting, regulatory cells (e.g., regulatory B cells). The method includes administering a CAR-expressing cell (e.g., CD19 CAR-expressing cell) described herein in an amount sufficient to reduce the regulatory cells. In some embodiments, the methods can be used to modulate a tumor microenvironment, e.g., to enhance the effectiveness of a therapy described herein.

[0910] In some embodiments, a dose of CAR-expressing cells (e.g., CAR-expressing cells described herein, e.g., CD19 CAR-expressing cells described herein) comprises about 10⁴ to about 10⁹ cells/kg, e.g., about 10⁴ to about 10⁵ cells/kg, about 10⁵ to about 10⁶ cells/kg, about 10⁶ to about 10⁷ cells/kg, about 10⁷ to about 10⁸ cells/kg, or about 10⁸ to about 10⁹ cells/kg. In embodiments, the dose of CAR-expressing cells comprises about 0.6×10⁶ cells/kg to about 2×10⁷ cells/kg.

[0911] In some embodiments, a dose of CAR-expressing cells described herein (e.g., CD19 CAR-expressing cells) comprises about 2×10⁵, 1×10⁶, 1.1×10⁶, 2×10⁶, 3×10⁶, 3.6×10⁶, 5×10⁶, 1×10⁷, 1.8×10⁷, 2×10⁷, 5×10⁷, 1×10⁸, 2×10⁸, 3×10⁸, or 5×10⁸ cells/kg. In some embodiments, a dose of CAR cells (e.g., CD19 CAR-expressing cells) comprises at least about 1×10⁶, 1.1×10⁶,2×10⁶, 3.6×10⁶, 5×10⁶, 1×10⁷, 1.8×10⁷, 2×10⁷, 5×10⁷, 1×10⁸, 2×10⁸, 3×10⁸, or 5×10⁸ cells/kg. In some embodiments, a dose of CAR cells (e.g., CD19 CAR-expressing cells) comprises up to about 1×10⁶, 1.1×10⁶, 2×10⁶, 3.6×10⁶, 5×10⁶, 1×10⁷, 1.8×10⁷, 2×10⁷, 5×10⁷, 1×10⁸, 2×10⁸, 3×10⁸, or 5×10⁸ cells/kg. In some embodiments, a dose of CAR cells (e.g., CD19 CAR-expressing cells) comprises about 1.1×10⁶-1.8×10⁷ cells/kg. In some embodiments, a dose of CAR cells (e.g., CD19 CAR-expressing cell) comprises about 1×10⁷, 2×10⁷, 5×10⁷, 1×10⁸, 2×10⁸, 3×10⁸, 5×10⁸, 1×10⁹, 2×10⁹, or 5×10⁹ cells. In some embodiments, a dose of CAR cells (e.g., e.g., CD19 CAR-expressing cells) comprises at least about 1×10⁷, 2×10⁷, 5×10⁷, 1×10⁸, 2×10⁸, 3×10⁸, 5×10⁸, 1×10⁹, 2×10⁹, or 5×10⁹ cells. In some embodiments, a dose of CAR cells (e.g., e.g., CD19 CAR-expressing cells) comprises up to about 1×10⁷, 2×10⁷, 5×10⁷, 1×10⁸, 2×10⁸, 3×10⁸, 5×10⁸, 1×10⁹, 2×10⁹, or 5×10⁹ cells.

[0912] In some embodiments, a dose of CAR cells (e.g., CD19 CAR-expressing cells) comprises up to about 1×10⁷, 1.5×10⁷, 2×10⁷, 2.5×10⁷, 3×10⁷, 3.5×10⁷, 4×10⁷, 5×10⁷, 1×10⁸, 1.5×10⁸, 2×10⁸, 2.5×10⁸, 3×10⁸, 3.5×10⁸, 4×10⁸, 5×10⁸, 1×10⁹, 2×10⁹, or 5×10⁹ cells. In some embodiments, a dose of CAR cells (e.g., CD19 CAR-expressing cell) comprises up to about 1-3×10⁷ to 1-3×10⁸ cells. In some embodiments, the subject is administered about 1-3×10⁷ of CD19 CAR-expressing cells. In other embodiments, the subject is administered about 1-3×10⁸ of CD19 CAR-expressing cells.

[0913] In some embodiments, a dose of CAR-expressing cells (e.g., CAR-expressing cells described herein, e.g., CD19 CAR-expressing cells described herein) comprises about 1×10⁶ cells/m² to about 1×10⁹ cells/m², e.g., about 1×10⁷ cells/m² to about 5×10⁸ cells/m², e.g., about 1.5×10⁷ cells/m², about 2×10⁷ cells/m², about 4.5×10⁷ cells/m², about 10⁸ cells/m², about 1.2×10⁸ cells/m², or about 2×10⁸ cells/m².

### Selected Doses and Dosage Regimens

[0914] Accordingly, in one aspect, the invention pertains to a method of treating a subject (e.g., a mammal) having a cancer, comprising administering immune effector cells comprising a CAR molecule. In one embodiment, the immune effector cells are administered as a single dose, e.g., a single dose as described herein. In other embodiments the immune effector cells are administered as a plurality of doses, e.g., a first dose, a second dose, and optionally a third dose, e.g., as described herein.

[0915] In a related aspect, the invention pertains to a method of treating a subject (e.g., an adult subject) having a cancer (e.g., acute lymphoblastic leukemia (ALL)), comprising administering to the subject a a dose, e.g., a single dose, or a plurality of doses (e.g., a first dose, a second dose, and optionally one or more additional doses), each dose comprising immune effector cells expressing a CAR molecule, e.g., a CD19 CAR molecule, (e.g., a CAR molecule according to residues 22-486 of SEQ ID NO: 58) or a BCMA CAR molecule.

[0916] In yet another aspect, the invention pertains to a use of a single dose, or a plurality of doses (e.g., a first dose, a second dose, and optionally a third dose), of immune effector cells comprising a CAR molecule (e.g., a CD19 CAR molecule, (e.g., a CAR molecule according to residues 22-486 of SEQ ID NO: 58) or a BCMA CAR molecule), for treating a subject (e.g., an adult) having a cancer (e.g., acute lymphoblastic leukemia (ALL)).

[0917] In certain aspects, the invention features a method of treating a subject (e.g., a pediatric subject) having a cancer (e.g., ALL), comprising administering to the subject immune effector cells expressing a CAR molecule. The method comprises administering one of the following:
[0918] (i) administering a dose of 2-5×10⁶ viable CAR-expressing cells/kg, e.g., transduced viable T cells cells/kg, wherein the subject has a body mass of less than or equal to 50 kg;
[0919] (ii) administering a dose of 1.0-2.5×10⁸ viable CAR-expressing cells, e.g., transduced viable T cells, wherein the subject has a body mass of at least 50 kg;
[0920] (iii) administering a dose of 0.2-5×10⁶ viable CAR-expressing cells/kg, e.g., transduced viable T cells/kg, wherein the subject has a body mass of less than or equal to 50 kg; or
[0921] (iv) administering a dose of 0.1-2.5×10⁸ viable CAR-expressing cells, e.g., transduced viable T cells, wherein the subject has a body mass of at least 50 kg.

[0922] In embodiments, a single dose is administered to the subject, e.g., the pediatric subject. In embodiments, the CAR-expressing cell is a CD19 CAR-expressing cell, e.g., a cell expressing a CD19 CAR of any Tables 2 or 3 herein, e.g., CTL019 or CTL119.

[0923] In embodiments, the doses are administered on sequential days, e.g., the first dose is administered on day 1, the second dose is administered on day 2, and the optional third dose (if administered) is administered on day 3.

[0924] In embodiments, a fourth, fifth, or sixth dose, or more doses, are administered.

[0925] In embodiments, the first dose comprises about 10% of the total dose, the second dose comprises about 30% of the total dose, and the third dose comprises about 60% of the total dose, wherein the aforementioned percentages have a sum of 100%. In embodiments, the first dose comprises about 9-11%, 8-12%, 7-13%, or 5-15% of the total dose. In embodiments, the second dose comprises about 29-31%, 28-32%, 27-33%, 26-34%, 25-35%, 24-36%, 23-37%, 22-38%, 21-39%, or 20-40% of the total dose. In embodiments, the third dose comprises about 55-65%, 50-70%, 45-75%, or 40-80% of the total dose. In embodiments, the total dose refers to the total number of viable CAR-expressing cells administered over the course of 1 week, 2 weeks, 3 weeks, or 4 weeks. In some embodiments wherein two doses are administered, the total dose refers to the sum of the number of viable CAR-expressing cells administered to the subject in the first and second doses. In some embodiments wherein three doses are administered, the total dose refers to the sum of the number of viable CAR-expressing cells administered to the subject in the first, second, and third doses.

[0926] In embodiments, the dose is measured according to the number of viable CAR-expressing cells therein. CAR expression can be measured, e.g., by flow cytometry using an antibody molecule that binds the CAR molecule and a detectable label. Viability can be measured, e.g., by Cellometer.

[0927] In embodiments, the viable CAR-expressing cells are administered in ascending doses. In embodiments, the second dose is larger than the first dose, e.g., larger by 10%, 20%, 30%, or 50%. In embodiments, the second dose is twice, three times, four times, or five times the size of the first dose. In embodiments, the third dose is larger than the second dose, e.g., larger by 10%, 20%, 30%, or 50%. In embodiments, the third dose is twice, three times, four times, or five times the size of the second dose.

[0928] In certain embodiments, the method includes one, two, three, four, five, six, seven or all of a)-h) of the following:
[0929] a) the number of CAR-expressing, viable cells administered in the first dose is no more than ⅓, of the number of CAR-expressing, viable cells administered in the second dose;
[0930] b) the number of CAR-expressing, viable cells administered in the first dose is no more than 1/×, wherein X is 2, 3, 4, 5, 6, 7, 8, 9, 10, 15, 20, 30, 40 or 50, of the total number of CAR-expressing, viable cells administered;
[0931] c) the number of CAR-expressing, viable cells administered in the first dose is no more than 1×10⁷, 2×10⁷, 3×10⁷, 4×10⁷, 5×10⁷, 6×10⁷, 7×10⁷, 8×10⁷, 9×10⁷, 1×10⁸, 2×10⁸, 3×10⁸, 4×10⁸, or 5×10⁸ CAR-expressing, viable cells, and the second dose is greater than the first dose;
[0932] d) the number of CAR-expressing, viable cells administered in the second dose is no more than ½, of the number of CAR-expressing, viable cells administered in the third dose;
[0933] e) the number of CAR-expressing, viable cells administered in the second dose is no more than 1/Y, wherein Y is 2, 3, 4, 5, 6, 7, 8, 9, 10, 15, 20, 30, 40 or 50, of the total number of CAR-expressing, viable cells administered;
[0934] f) the number of CAR-expressing, viable cells administered in the second dose is no more than 1×10⁷, 2×10⁷, 3×10⁷, 4×10⁷, 5×10⁷, 6×10⁷, 7×10⁷, 8×10⁷, 9×10⁷, 1×10⁸, 2×10⁸, 3×10⁸, 4×10⁸, or 5×10⁸ CAR-expressing, viable cells, and the third dose is greater than the second dose;
[0935] h) the dosages and time periods of administration of the first, second, and optionally third doses are selected such that the subject experiences CRS at a level no greater than 4, 3, 2, or 1.

[0936] In embodiments, the total dose is about 5×10⁸ CAR-expressing, viable cells. In embodiments, the total dose is about 5×10⁷-5×10⁸ CAR-expressing, viable cells. In embodiments, the first dose is about 5×10⁷ (e.g., ±10%, 20%, or 30%) CAR-expressing, viable cells, the second dose is about 1.5×10⁸ (e.g., ±10%, 20%, or 30%) CAR-expressing, viable cells, and the third dose is about 3×10⁸ (e.g., ±10%, 20%, or 30%) CAR-expressing, viable cells.

[0937] In embodiments, the method comprises administering, e.g., as a single dose or as a plurality of doses as described herein, a dose of 0.02-5×10⁶ viable CAR-expressing cells/kg, e.g., transduced viable T cells/kg, e.g., a dose of 0.02-5×10⁶, 0.03-5×10⁶, 0.04-5×10⁶, 0.05-5×10⁶, 0.06-5×10⁶, 0.07-5×10⁶, 0.08-5×10⁶, 0.09-5×10⁶, 0.10-5×10⁶, 0.11-5×10⁶, 0.12-5×10⁶, 0.13-5×10⁶, 0.14-5×10⁶, 0.15-5×10⁶, 0.16-5×10⁶, 0.17-5×10⁶, 0.18-5×10⁶, 0.19-5×10⁶, or 0.20-5×10⁶, wherein the subject has a body mass of less than or equal to 50 kg.

[0938] In embodiments, the method comprises administering, e.g., as a single dose or as a plurality of doses as described herein, a dose of 0.2-5×10⁶ viable CAR-expressing cells/kg, e.g., transduced viable T cells/kg, e.g., a dose of 0.2-5×10⁶, 0.3-5×10⁶, 0.4-5×10⁶, 0.5-5×10⁶, 0.6-5×10⁶, 0.7-5×10⁶, 0.8-5×10⁶, 0.9-5×10⁶, 1.0-5×10⁶, 1.1-5×10⁶, 1.2-5×10⁶, 1.3-5×10⁶, 1.4-5×10⁶, 1.5-5×10⁶, 1.6-5×10⁶, 1.7-5×10⁶, 1.8-5×10⁶, 1.9-5×10⁶, or 2-5×10⁶, wherein the subject has a body mass of less than or equal to 50 kg.

[0939] In embodiments, the method comprises administering, e.g., as a single dose or as a plurality of doses as described herein, a dose of 2-50×10⁶ viable CAR-expressing cells/kg, e.g., transduced viable T cells/kg, e.g., a dose of 2-5×10⁶, 2-10×10⁶, 2-15×10⁶, 2-20×10⁶, 2-25×10⁶, 2-30×10⁶, 2-35×10⁶, 2-40×10⁶, 2-45×10⁶, or 2-50×10⁶, wherein the subject has a body mass of less than or equal to 50 kg.

[0940] In embodiments, the method further comprises administering, e.g., as a single dose or as a plurality of doses as described herein, a dose of 0.2-50×10⁶ viable CAR-expressing cells/kg, e.g., transduced viable T cells/kg, e.g., a dose of 0.2-5×10⁶, 0.2-10×10⁶, 0.2-15×10⁶, 0.2-20×10⁶, 0.2-25×10⁶, 0.2-30×10⁶, 0.2-35×10⁶, 0.2-40×10⁶, 0.2-45×10⁶, or 0.2-50×10⁶, wherein the subject has a body mass of less than or equal to 50 kg.

[0941] In embodiments, the method comprises administering, e.g., as a single dose or as a plurality of doses as described herein, a dose of 0.02-50×10⁶ viable CAR-expressing cells/kg, e.g., transduced viable T cells/kg, e.g, a dose of 0.02-50×10⁶, 0.03-45×10⁶, 0.05-40×10⁶, 0.1-35×10⁶, 0.2-30×10⁶, 0.3-25×10⁶, 0.4-20×10⁶, 0.5-15×10⁶, 1-10×10⁶, 2-5×10⁶, wherein the subject has a body mass of less than or equal to 50 kg.

[0942] In embodiments, the method comprises administering, e.g., as a single dose or as a plurality of doses as described herein, a dose of 0.01-2.5×10⁸ viable CAR-expressing cells, e.g., transduced viable T cells, e.g., a dose of 0.01-2.5×10⁸, 0.02-2.5×10⁸, 0.03-2.5×10⁸, 0.04-2.5×10⁸, 0.05-2.5×10⁸, 0.06-2.5×10⁸, 0.07-2.5×10⁸, 0.08-2.5×10⁸, 0.09-2.5×10⁸, or 0.10-2.5×10⁸, wherein the subject has a body mass of at least 50 kg.

[0943] In embodiments, the method comprises administering, e.g., as a single dose or as a plurality of doses as described herein, a dose of 0.1-2.5×10⁸ viable CAR-expressing cells, e.g., transduced viable T cells, e.g., a dose of 0.1-2.5×10⁸, 0.2-2.5×10⁸, 0.3-2.5×10⁸, 0.4-2.5×10⁸, 0.5-2.5×10⁸, 0.6-2.5×10⁸, 0.7-2.5×10⁸, 0.8-2.5×10⁸, 0.9-2.5×10⁸, or 1.0-2.5×10⁸, wherein the subject has a body mass of at least 50 kg.

[0944] In embodiments, the method comprises administering, e.g., as a single dose or as a plurality of doses as described herein, a dose of 1-25×10⁸ viable CAR-expressing cells, e.g., transduced viable T cells/kg, e.g., a dose of 1-2.5×10⁸, 1-5×10⁸, 1-7.5×10⁸, 1-10×10⁸, 1-12.5×10⁸, 1-15×10⁸, 1-17.5×10⁸, 1-20×10⁸, 1-22.5×10⁸, or 1-25×10⁸, wherein the subject has a body mass of at least 50 kg.

[0945] In embodiments, the method comprises administering, e.g., as a single dose or as a plurality of doses as described herein, a dose of 0.1-2.5×10⁸ viable CAR-expressing cells, e.g., transduced viable T cells/kg, e.g., a dose of 0.1-2.5×10⁸, 0.1-5×10⁸, 0.1-7.5×10⁸, 0.1-10×10⁸, 0.1-12.5×10⁸, 0.1-15×10⁸, 0.1-17.5×10⁸, 0.1-20×10⁸, 0.1-22.5×10⁸, or 0.1-25×10⁸, wherein the subject has a body mass of at least 50 kg.

[0946] In embodiments, the method comprises administering, e.g., as a single dose or as a plurality of doses as described herein, a dose of 0.01-25×10⁸ viable CAR-expressing cells, e.g., transduced viable T cells/kg, e.g., a dose of 0.01-25×10⁸, 0.05-22.5×10⁸, 0.1-20×10⁸, 0.2-17.5×10⁸, 0.5-15×10⁸, 0.6-12.5×10⁸, 0.7-10×10⁸, 0.8-7.5×10⁸, 0.9-5×10⁸, or 1-2.5×10⁸, wherein the subject has a body mass of at least 50 kg.

[0947] In any of the methods or compositions for use described herein, in some embodiments, a dose of CAR-expressing cells (e.g., CD19 CAR-expressing cells) comprises about 10⁴ to about 10⁹ cells/kg, e.g., about 10⁴ to about 10⁵ cells/kg, about 10⁵ to about 10⁶ cells/kg, about 10⁶ to about 10⁷ cells/kg, about 10⁷ to about 10⁸ cells/kg, or about 10⁸ to about 10⁹ cells/kg; or at least about one of: 1×10⁷, 1.5×10⁷, 2×10⁷, 2.5×10⁷, 3×10⁷, 3.5×10⁷, 4×10⁷, 5×10⁷, 1×10⁸, 1.5×10⁸, 2×10⁸, 2.5×10⁸, 3×10⁸, 3.5×10⁸, 4×10⁸, 5×10⁸, 1×10⁹, 2×10⁹, or 5×10⁹ cells. In some embodiments, a dose of CAR-expressing cells (e.g., CD19 CAR-expressing cells or BCMA CAR-expressing cells) comprises at least about 1-5×10⁷ to 1-5×10⁸ CAR-expressing cells In some embodiments, the subject is administered about 1-5×10⁷ CAR-expressing cells (e.g., CD19 CAR-expressing cells or BCMA CAR-expressing cells)). In other embodiments, the subject is administered about 1-5×10⁸ CAR-expressing cells (e.g., CD19 CAR-expressing cells or BCMA CAR-expressing cells)).

[0948] Any of the dose ranges disclosed herein is intended to include the upper and lower endpoint values specified. For example, a dose range of 1-5×10⁷ CAR-expressing cells includes a dose of 1×10⁷ CAR-expressing cells and 5×10⁷ CAR-expressing cells (unless explicitly noted otherwise).

### Combination Therapies

[0949] The combination of a CAR as described herein (e.g., a CD19 or BCMA CAR-expressing cell described herein e.g., and one or more B-cell inhibitors, e.g., as described herein) may be used in combination with other known agents and therapies.

[0950] A CAR-expressing cell described herein and/or the at least one additional therapeutic agent can be administered simultaneously, in the same or in separate compositions, or sequentially. For sequential administration, the CAR-expressing cell described herein can be administered first, and the additional agent can be administered second, or the order of administration can be reversed.

[0951] The CAR therapy and/or other therapeutic agents (such as a second CAR therapy), procedures or modalities can be administered during periods of active disorder, or during a period of remission or less active disease. The CAR therapy can be administered before the other treatment, concurrently with the treatment, post-treatment, or during remission of the disorder.

[0952] For instance, in some embodiments, CAR therapy is administered to a subject having a disease associated with CD19 or BCMA expression, e.g., a cancer. The subject can be assayed for indicators of responsiveness or relapse. In some embodiments, when the subject shows one or more signs of relapse, e.g., a frameshift and/or premature stop codon in CD19, an additional therapy is administered. In embodiments, the additional therapy is a B-cell inhibitor. The CD19 therapy may be continued (for instance, when there are still some CD19-expressing cancer cells detectable in the subject) or may be discontinued (for instance, when a risk-benefit analysis favors discontinuing the therapy).

[0953] When administered in combination, the CAR therapy and the additional agent (e.g., second or third agent), or all, can be administered in an amount or dose that is higher, lower or the same than the amount or dosage of each agent used individually, e.g., as a monotherapy. In certain embodiments, the administered amount or dosage of the CAR therapy, the additional agent (e.g., second or third agent), or all, is lower (e.g., at least 20%, at least 30%, at least 40%, or at least 50%) than the amount or dosage of each agent used individually, e.g., as a monotherapy. In other embodiments, the amount or dosage of the CAR therapy, the additional agent (e.g., second or third agent), or all, that results in a desired effect (e.g., treatment of cancer) is lower (e.g., at least 20%, at least 30%, at least 40%, or at least 50% lower) than the amount or dosage of each agent used individually, e.g., as a monotherapy, required to achieve the same therapeutic effect.

[0954] The one or more therapies described herein can be administered to the subject substantially at the same time or in any order. For instance, a CD19 inhibitor, e.g., a CD19 CAR-expressing cell described herein, the one or more B-cell inhibitor, and/or optionally the at least one additional therapeutic agent can be administered simultaneously, in the same or in separate compositions, or sequentially. Additional timings of administration, e.g., sequence of administration, are described in pages 4-15 of International Application WO 2016/164731, filed Apr. 8, 2016, which is incorporated by reference in its entirety

[0955] In embodiments, one or more of the therapeutics in the combination therapy is an antibody molecule. Cancer antigens can be targeted with monoclonal antibody therapy. Monoclonal antibody (mAb) therapy has been shown to exert powerful antitumor effects by multiple mechanisms, including complement-dependent cytotoxicity (CDC), antibody-dependent cellular cytotoxicity (ADCC) and direct cell inhibition or apoptosis-inducing effects on tumor cells that over-express the target molecules.

[0956] In further aspects, the combination of the CAR-expressing cell described herein may be used in a treatment regimen in combination with surgery, chemotherapy, radiation, an mTOR pathway inhibitor, immunosuppressive agents, such as cyclosporin, azathioprine, methotrexate, mycophenolate, and FK506, antibodies, or other immunoablative agents such as CAMPATH, anti-CD3 antibodies or other antibody therapies, cytoxin, fludarabine, cyclosporin, FK506, rapamycin, mycophenolic acid, steroids, FR901228, cytokines, and irradiation. peptide vaccine, such as that described in Izumoto et al. 2008 J Neurosurg 108:963-971.

[0957] In one embodiment, the CAR-expressing cell described herein (optionally in combination with a B-cell inhibitor) can be used in combination with a chemotherapeutic agent. Exemplary chemotherapeutic agents include an anthracycline (e.g., doxorubicin (e.g., liposomal doxorubicin)); a vinca alkaloid (e.g., vinblastine, vincristine, vindesine, vinorelbine); an alkylating agent (e.g., cyclophosphamide, decarbazine, melphalan, ifosfamide, temozolomide); an immune cell antibody (e.g., alemtuzamab, gemtuzumab, rituximab, tositumomab); an antimetabolite (including, e.g., folic acid antagonists, pyrimidine analogs, purine analogs and adenosine deaminase inhibitors (e.g., fludarabine)); a TNFR glucocorticoid induced TNFR related protein (GITR) agonist; a proteasome inhibitor (e.g., aclacinomycin A, gliotoxin or bortezomib); an immunomodulator such as thalidomide or a thalidomide derivative (e.g., lenalidomide).

[0958] General Chemotherapeutic agents considered for use in combination therapies include anastrozole (Arimidex®), bicalutamide (Casodex®), bleomycin sulfate (Blenoxane@), busulfan (Myleran®), busulfan injection (Busulfex®), capecitabine (Xeloda®), N4-pentoxycarbonyl-5-deoxy-5-fluorocytidine, carboplatin (Paraplatin®), carmustine (BiCNU®), chlorambucil (Leukeran®), cisplatin (Platinol®), cladribine (Leustatin®), cyclophosphamide (Cytoxan® or Neosar®), cytarabine, cytosine arabinoside (Cytosar-U®), cytarabine liposome injection (DepoCyt®), dacarbazine (DTIC-Dome@), dactinomycin (Actinomycin D, Cosmegan), daunorubicin hydrochloride (Cerubidine®), daunorubicin citrate liposome injection (DaunoXome®), dexamethasone, docetaxel (Taxotere®), doxorubicin hydrochloride (Adriamycin®, Rubex®), etoposide (Vepesid®), fludarabine phosphate (Fludara®), 5-fluorouracil (Adrucil®, Efudex®), flutamide (Eulexin®), tezacitibine, gemcitabine (difluorodeoxycitidine), hydroxyurea (Hydrea®), Idarubicin (Idamycin®), ifosfamide (IFEX®), irinotecan (Camptosar®), L-asparaginase (ELSPAR®), leucovorin calcium, melphalan (Alkeran®), 6-mercaptopurine (Purinethol®), methotrexate (Folex®), mitoxantrone (Novantrone®), mylotarg, paclitaxel (Taxol®), nab-paclitaxel (Abraxane®), phoenix (Yttrium90/MX-DTPA), pentostatin, polifeprosan 20 with carmustine implant (Gliadel®), tamoxifen citrate (Nolvadex®), teniposide (Vumon®), 6-thioguanine, thiotepa, tirapazamine (Tirazone®), topotecan hydrochloride for injection (Hycamptin®), vinblastine (Velban®), vincristine (Oncovin®), and vinorelbine (Navelbine®).

[0959] Treatment with a combination of a chemotherapeutic agent and a cell expressing a CAR molecule described herein can be used to treat a hematologic cancer described herein, e.g., AML. In embodiments, the combination of a chemotherapeutic agent and a CAR-expressing cell is useful for targeting, e.g., killing, cancer stem cells, e.g., leukemic stem cells, e.g., in subjects with AML. In embodiments, the combination of a chemotherapeutic agent and a CAR-expressing cell is useful for treating minimal residual disease (MRD). MRD refers to the small number of cancer cells that remain in a subject during treatment, e.g., chemotherapy, or after treatment. MRD is often a major cause for relapse. The present invention provides a method for treating cancer, e.g., MRD, comprising administering a chemotherapeutic agent in combination with a CAR-expressing cell, e.g., as described herein.

[0960] In an embodiment, the chemotherapeutic agent is administered prior to administration of the cell expressing a CAR molecule, e.g., a CAR molecule described herein. In chemotherapeutic regimens where more than one administration of the chemotherapeutic agent is desired, the chemotherapeutic regimen is initiated or completed prior to administration of a cell expressing a CAR molecule, e.g., a CAR molecule described herein. In embodiments, the chemotherapeutic agent is administered at least 1 day, 2 days, 3 days, 4 days, 5 days, 6 days, 7 days, 8 days, 9 days, 10 days, 11 days, 12 days, 13 days, 14 days, 15 days, 20 days, 25 days, or 30 days prior to administration of the cell expressing the CAR molecule. In embodiments, the chemotherapeutic regimen is initiated or completed at least 1 day, 2 days, 3 days, 4 days, 5 days, 6 days, 7 days, 8 days, 9 days, 10 days, 11 days, 12 days, 13 days, 14 days, 15 days, 20 days, 25 days, or 30 days prior to administration of the cell expressing the CAR molecule.

[0961] Anti-cancer agents of particular interest for combinations with the compounds of the present invention include: antimetabolites; drugs that inhibit either the calcium dependent phosphatase calcineurin or the p70S6 kinase FK506) or inhibit the p70S6 kinase; alkylating agents; mTOR inhibitors; immunomodulators; anthracyclines; vinca alkaloids; proteosome inhibitors; GITR agonists; protein tyrosine phosphatase inhibitors; a CDK4 kinase inhibitor; a BTK kinase inhibitor; a MKN kinase inhibitor; a DGK kinase inhibitor; or an oncolytic virus.

[0962] Exemplary antimetabolites include, without limitation, folic acid antagonists (also referred to herein as antifolates), pyrimidine analogs, purine analogs and adenosine deaminase inhibitors): methotrexate (Rheumatrex®, Trexall®), 5-fluorouracil (Adrucil®, Efudex®, Fluoroplex®), floxuridine (FUDF®), cytarabine (Cytosar-U®, Tarabine PFS), 6-mercaptopurine (Puri-Nethol®)), 6-thioguanine (Thioguanine Tabloid@), fludarabine phosphate (Fludara®), pentostatin (Nipent®), pemetrexed (Alimta@), raltitrexed (Tomudex®), cladribine (Leustatin®), clofarabine (Clofarex®, Clolar®), mercaptopurine (Puri-Nethol®), capecitabine (Xeloda®), nelarabine (Arranon®), azacitidine (Vidaza®) and gemcitabine (Gemzar®). Preferred antimetabolites include, e.g., 5-fluorouracil (Adrucil®, Efudex®, Fluoroplex®), floxuridine (FUDF®), capecitabine (Xeloda®), pemetrexed (Alimta@), raltitrexed (Tomudex®) and gemcitabine (Gemzar®).

[0963] Exemplary alkylating agents include, without limitation, nitrogen mustards, ethylenimine derivatives, alkyl sulfonates, nitrosoureas and triazenes): uracil mustard (Aminouracil Mustard@, Chlorethaminacil®, Demethyldopan®, Desmethyldopan®, Haemanthamine®, Nordopan®, Uracil nitrogen mustard@, Uracillost®, Uracilmostaza®, Uramustin®, Uramustine®), chlormethine (Mustargen®), cyclophosphamide (Cytoxan®, Neosar®, Clafen®, Endoxan®, Procytox®, Revimmune™), ifosfamide (Mitoxana®), melphalan (Alkeran®), Chlorambucil (Leukeran®), pipobroman (Amedel®, Vercyte®), triethylenemelamine (Hemel®, Hexalen®, Hexastat®), triethylenethiophosphoramine, Temozolomide (Temodar®), thiotepa (Thioplex®), busulfan (Busilvex®, Myleran®), carmustine (BiCNU®), lomustine (CeeNU®), streptozocin (Zanosar®), and Dacarbazine (DTIC-Dome®). Additional exemplary alkylating agents include, without limitation, Oxaliplatin (Eloxatin®); Temozolomide (Temodar® and Temodal®); Dactinomycin (also known as actinomycin-D, Cosmegen®); Melphalan (also known as L-PAM, L-sarcolysin, and phenylalanine mustard, Alkeran®); Altretamine (also known as hexamethylmelamine (HMM), Hexalen®); Carmustine (BiCNU®); Bendamustine (Treanda®); Busulfan (Busulfex® and Myleran®); Carboplatin (Paraplatin®); Lomustine (also known as CCNU, CeeNU®); Cisplatin (also known as CDDP, Platinol® and Platinol®-AQ); Chlorambucil (Leukeran®); Cyclophosphamide (Cytoxan® and Neosar®); Dacarbazine (also known as DTIC, DIC and imidazole carboxamide, DTIC-Dome@); Altretamine (also known as hexamethylmelamine (HMM), Hexalen®); Ifosfamide (Ifex®); Prednumustine; Procarbazine (Matulane®); Mechlorethamine (also known as nitrogen mustard, mustine and mechloroethamine hydrochloride, Mustargen®); Streptozocin (Zanosar®); Thiotepa (also known as thiophosphoamide, TESPA and TSPA, Thioplex®); Cyclophosphamide (Endoxan®, Cytoxan®, Neosar®, Procytox®, Revimmune®); and Bendamustine HCl (Treanda®).

[0964] In embodiments, a CAR-expressing cell described herein is administered to a subject in combination with fludarabine, cyclophosphamide, and/or rituximab. In embodiments, a CAR-expressing cell described herein is administered to a subject in combination with fludarabine, cyclophosphamide, and rituximab (FCR). In embodiments, the subject has CLL. For example, the subject has a deletion in the short arm of chromosome 17 (del(17p), e.g., in a leukemic cell). In other examples, the subject does not have a del(17p). In embodiments, the subject comprises a leukemic cell comprising a mutation in the immunoglobulin heavy-chain variable-region (IgV_{H}) gene. In other embodiments, the subject does not comprise a leukemic cell comprising a mutation in the immunoglobulin heavy-chain variable-region (IgV_{H}) gene. In embodiments, the fludarabine is administered at a dosage of about 10-50 mg/m² (e.g., about 10-15, 15-20, 20-25, 25-30, 30-35, 35-40, 40-45, or 45-50 mg/m²), e.g., intravenously. In embodiments, the cyclophosphamide is administered at a dosage of about 200-300 mg/m² (e.g., about 200-225, 225-250, 250-275, or 275-300 mg/m²), e.g., intravenously. In embodiments, the rituximab is administered at a dosage of about 400-600 mg/m² (e.g., 400-450, 450-500, 500-550, or 550-600 mg/m²), e.g., intravenously.

[0965] In embodiments, a CAR-expressing cell described herein is administered to a subject in combination with bendamustine and rituximab. In embodiments, the subject has CLL. For example, the subject has a deletion in the short arm of chromosome 17 (del(17p), e.g., in a leukemic cell). In other examples, the subject does not have a del(17p). In embodiments, the subject comprises a leukemic cell comprising a mutation in the immunoglobulin heavy-chain variable-region (IgV_{H}) gene. In other embodiments, the subject does not comprise a leukemic cell comprising a mutation in the immunoglobulin heavy-chain variable-region (IgV_{H}) gene. In embodiments, the bendamustine is administered at a dosage of about 70-110 mg/m2 (e.g., 70-80, 80-90, 90-100, or 100-110 mg/m2), e.g., intravenously. In embodiments, the rituximab is administered at a dosage of about 400-600 mg/m2 (e.g., 400-450, 450-500, 500-550, or 550-600 mg/m²), e.g., intravenously.

[0966] In embodiments, a CAR-expressing cell described herein is administered to a subject in combination with rituximab, cyclophosphamide, doxorubicine, vincristine, and/or a corticosteroid (e.g., prednisone). In embodiments, a CAR-expressing cell described herein is administered to a subject in combination with rituximab, cyclophosphamide, doxorubicine, vincristine, and prednisone (R-CHOP). In embodiments, the subject has diffuse large B-cell lymphoma (DLBCL). In embodiments, the subject has nonbulky limited-stage DLBCL (e.g., comprises a tumor having a size/diameter of less than 7 cm). In embodiments, the subject is treated with radiation in combination with the R-CHOP. For example, the subject is administered R-CHOP (e.g., 1-6 cycles, e.g., 1, 2, 3, 4, 5, or 6 cycles of R-CHOP), followed by radiation. In some cases, the subject is administered R-CHOP (e.g., 1-6 cycles, e.g., 1, 2, 3, 4, 5, or 6 cycles of R-CHOP) following radiation.

[0967] In embodiments, a CAR-expressing cell described herein is administered to a subject in combination with etoposide, prednisone, vincristine, cyclophosphamide, doxorubicin, and/or rituximab. In embodiments, a CAR-expressing cell described herein is administered to a subject in combination with etoposide, prednisone, vincristine, cyclophosphamide, doxorubicin, and rituximab (EPOCH-R). In embodiments, a CAR-expressing cell described herein is administered to a subject in combination with dose-adjusted EPOCH-R (DA-EPOCH-R). In embodiments, the subject has a B cell lymphoma, e.g., a Myc-rearranged aggressive B cell lymphoma.

[0968] In embodiments, a CAR-expressing cell described herein is administered to a subject in combination with rituximab and/or lenalidomide. Lenalidomide ((RS)-3-(4-Amino-1-oxo 1,3-dihydro-2H-isoindol-2-yl)piperidine-2,6-dione) is an immunomodulator. In embodiments, a CAR-expressing cell described herein is administered to a subject in combination with rituximab and lenalidomide. In embodiments, the subject has follicular lymphoma (FL) or mantle cell lymphoma (MCL). In embodiments, the subject has FL and has not previously been treated with a cancer therapy. In embodiments, lenalidomide is administered at a dosage of about 10-20 mg (e.g., 10-15 or 15-20 mg), e.g., daily. In embodiments, rituximab is administered at a dosage of about 350-550 mg/m² (e.g., 350-375, 375-400, 400-425, 425-450, 450-475, or 475-500 mg/m²), e.g., intravenously.

[0969] Exemplary mTOR inhibitors include, e.g., temsirolimus; ridaforolimus (formally known as deferolimus, (1R,2R,4S)-4-[(2R)-2 [(1R,9S,12S,15R,16E,18R,19R,21R, 23S,24E,26E,28Z,30S,32S,35R)-1,18-dihydroxy-19,30-dimethoxy-15,17,21,23, 29,35-hexamethyl-2,3,10,14,20-pentaoxo-11,36-dioxa-4-azatricyclo[30.3.1.04-9]hexatriaconta-16,24,26,28-tetraen-12-yl]propyl]-2-methoxycyclohexyl dimethylphosphinate, also known as AP23573 and MK8669, and described in PCT Publication No. WO 03/064383); everolimus (Afinitor® or RAD001); rapamycin (AY22989, Sirolimus@); simapimod (CAS 164301-51-3); emsirolimus, (5-{2,4-Bis[(3S)-3-methylmorpholin-4-yl]pyrido[2,3-d]pyrimidin-7-yl}-2-methoxyphenyl)methanol (AZD8055); 2-Amino-8-[trans-4-(2-hydroxyethoxy)cyclohexyl]-6-(6-methoxy-3-pyridinyl)-4-methyl-pyrido[2,3-d]pyrimidin-7(8H)-one (PF04691502, CAS 1013101-36-4); and N²-[1,4-dioxo-4-[[4-(4-oxo-8-phenyl-4H-1-benzopyran-2-yl)morpholinium-4-yl]methoxy]butyl]-L-arginylglycyl-L-α-aspartylL-serine-, inner salt (SF1126, CAS 936487-67-1) (SEQ ID NO: 1316), and XL765.

[0970] Exemplary immunomodulators include, e.g., afutuzumab (available from Roche®); pegfilgrastim (Neulasta@); lenalidomide (CC-5013, Revlimid®); thalidomide (Thalomid®), actimid (CC4047); and IRX-2 (mixture of human cytokines including interleukin 1, interleukin 2, and interferon 7, CAS 951209-71-5, available from IRX Therapeutics).

[0971] Exemplary anthracyclines include, e.g., doxorubicin (Adriamycin® and Rubex®); bleomycin (Lenoxane®); daunorubicin (dauorubicin hydrochloride, daunomycin, and rubidomycin hydrochloride, Cerubidine®); daunorubicin liposomal (daunorubicin citrate liposome, DaunoXome®); mitoxantrone (DHAD, Novantrone®); epirubicin (Ellence™); idarubicin (Idamycin®, Idamycin PFS®); mitomycin C (Mutamycin®); geldanamycin; herbimycin; ravidomycin; and desacetylravidomycin.

[0972] Exemplary vinca alkaloids include, e.g., vinorelbine tartrate (Navelbine®), Vincristine (Oncovin®), and Vindesine (Eldisine®)); vinblastine (also known as vinblastine sulfate, vincaleukoblastine and VLB, Alkaban-AQ® and Velban®); and vinorelbine (Navelbine®).

[0973] Exemplary proteosome inhibitors include bortezomib (Velcade®); carfilzomib (PX-171-007, (S)-4-Methyl-N-((S)-1-(((S)-4-methyl-1-((R)-2-methyloxiran-2-yl)-1-oxopentan-2-yl)amino)-1-oxo-3-phenylpropan-2-yl)-2-((S)-2-(2-morpholinoacetamido)-4-phenylbutanamido)-pentanamide); marizomib (NPI-0052); ixazomib citrate (MLN-9708); delanzomib (CEP-18770); and O-Methyl-N-[(2-methyl-5-thiazolyl)carbonyl]-L-seryl-O-methyl-N-[(1S)-2-[(2R)-2-methyl-2-oxiranyl]-2-oxo-1-(phenylmethyl)ethyl]-L-serinamide (ONX-0912).

[0974] In embodiments, a CAR-expressing cell described herein is administered to a subject in combination with brentuximab. Brentuximab is an antibody-drug conjugate of anti-CD30 antibody and monomethyl auristatin E. In embodiments, the subject has Hodgkin's lymphoma (HL), e.g., relapsed or refractory HL. In embodiments, the subject comprises CD30+ HL. In embodiments, the subject has undergone an autologous stem cell transplant (ASCT). In embodiments, the subject has not undergone an ASCT. In embodiments, brentuximab is administered at a dosage of about 1-3 mg/kg (e.g., about 1-1.5, 1.5-2, 2-2.5, or 2.5-3 mg/kg), e.g., intravenously, e.g., every 3 weeks.

[0975] In embodiments, a CAR-expressing cell described herein is administered to a subject in combination with brentuximab and dacarbazine or in combination with brentuximab and bendamustine. Dacarbazine is an alkylating agent with a chemical name of 5-(3,3-Dimethyl-1-triazenyl)imidazole-4-carboxamide. Bendamustine is an alkylating agent with a chemical name of 4-[5-[Bis(2-chloroethyl)amino]-1-methylbenzimidazol-2-yl]butanoic acid. In embodiments, the subject has Hodgkin's lymphoma (HL). In embodiments, the subject has not previously been treated with a cancer therapy. In embodiments, the subject is at least 60 years of age, e.g., 60, 65, 70, 75, 80, 85, or older. In embodiments, dacarbazine is administered at a dosage of about 300-450 mg/m² (e.g., about 300-325, 325-350, 350-375, 375-400, 400-425, or 425-450 mg/m²), e.g., intravenously. In embodiments, bendamustine is administered at a dosage of about 75-125 mg/m² (e.g., 75-100 or 100-125 mg/m², e.g., about 90 mg/m²), e.g., intravenously. In embodiments, brentuximab is administered at a dosage of about 1-3 mg/kg (e.g., about 1-1.5, 1.5-2, 2-2.5, or 2.5-3 mg/kg), e.g., intravenously, e.g., every 3 weeks.

[0976] In some embodiments, a CAR-expressing cell described herein is administered to a subject in combination with a CD20 inhibitor, e.g., an anti-CD20 antibody (e.g., an anti-CD20 mono- or bispecific antibody) or a fragment thereof. Exemplary anti-CD20 antibodies include but are not limited to rituximab, ofatumumab, ocrelizumab, veltuzumab, obinutuzumab, TRU-015 (Trubion Pharmaceuticals), ocaratuzumab, and Pro131921 (Genentech). See, e.g., Lim et al. Haematologica. 95.1(2010):135-43.

[0977] In some embodiments, the anti-CD20 antibody comprises rituximab. Rituximab is a chimeric mouse/human monoclonal antibody IgG1 kappa that binds to CD20 and causes cytolysis of a CD20 expressing cell, e.g., as described in www.accessdata.fda.gov/drugsatfda_docs/label/2010/103705s53111bl.pdf. In embodiments, a CAR-expressing cell described herein is administered to a subject in combination with rituximab. In embodiments, the subject has CLL or SLL.

[0978] In some embodiments, rituximab is administered intravenously, e.g., as an intravenous infusion. For example, each infusion provides about 500-2000 mg (e.g., about 500-550, 550-600, 600-650, 650-700, 700-750, 750-800, 800-850, 850-900, 900-950, 950-1000, 1000-1100, 1100-1200, 1200-1300, 1300-1400, 1400-1500, 1500-1600, 1600-1700, 1700-1800, 1800-1900, or 1900-2000 mg) of rituximab. In some embodiments, rituximab is administered at a dose of 150 mg/m² to 750 mg/m², e.g., about 150-175 mg/m², 175-200 mg/m², 200-225 mg/m², 225-250 mg/m², 250-300 mg/m², 300-325 mg/m², 325-350 mg/m², 350-375 mg/m², 375-400 mg/m², 400-425 mg/m², 425-450 mg/m², 450-475 mg/m², 475-500 mg/m², 500-525 mg/m², 525-550 mg/m², 550-575 mg/m², 575-600 mg/m², 600-625 mg/m², 625-650 mg/m², 650-675 mg/m², or 675-700 mg/m², where m² indicates the body surface area of the subject. In some embodiments, rituximab is administered at a dosing interval of at least 4 days, e.g., 4, 7, 14, 21, 28, 35 days, or more. For example, rituximab is administered at a dosing interval of at least 0.5 weeks, e.g., 0.5, 1, 2, 3, 4, 5, 6, 7, 8 weeks, or more. In some embodiments, rituximab is administered at a dose and dosing interval described herein for a period of time, e.g., at least 2 weeks, e.g., at least 2, 3, 4, 5, 6, 7, 8, 9, 10, 11, 12, 13, 14, 15, 16, 17, 18, 19, 20 weeks, or greater. For example, rituximab is administered at a dose and dosing interval described herein for a total of at least 4 doses per treatment cycle (e.g., at least 4, 5, 6, 7, 8, 9, 10, 11, 12, 13, 14, 15, 16, or more doses per treatment cycle).

[0979] In some embodiments, the anti-CD20 antibody comprises ofatumumab. Ofatumumab is an anti-CD20 IgG1κ human monoclonal antibody with a molecular weight of approximately 149 kDa. For example, ofatumumab is generated using transgenic mouse and hybridoma technology and is expressed and purified from a recombinant murine cell line (NSO). See, e.g., www.accessdata.fda.gov/drugsatfda_docs/label/2009/1253261bl.pdf; and Clinical Trial Identifier number NCT01363128, NCT01515176, NCT01626352, and NCT01397591. In embodiments, a CAR-expressing cell described herein is administered to a subject in combination with ofatumumab. In embodiments, the subject has CLL or SLL.

[0980] In some embodiments, ofatumumab is administered as an intravenous infusion. For example, each infusion provides about 150-3000 mg (e.g., about 150-200, 200-250, 250-300, 300-350, 350-400, 400-450, 450-500, 500-550, 550-600, 600-650, 650-700, 700-750, 750-800, 800-850, 850-900, 900-950, 950-1000, 1000-1200, 1200-1400, 1400-1600, 1600-1800, 1800-2000, 2000-2200, 2200-2400, 2400-2600, 2600-2800, or 2800-3000 mg) of ofatumumab. In embodiments, ofatumumab is administered at a starting dosage of about 300 mg, followed by 2000 mg, e.g., for about 11 doses, e.g., for 24 weeks. In some embodiments, ofatumumab is administered at a dosing interval of at least 4 days, e.g., 4, 7, 14, 21, 28, 35 days, or more. For example, ofatumumab is administered at a dosing interval of at least 1 week, e.g., 1, 2, 3, 4, 5, 6, 7, 8, 9, 10, 11, 12, 24, 26, 28, 20, 22, 24, 26, 28, 30 weeks, or more. In some embodiments, ofatumumab is administered at a dose and dosing interval described herein for a period of time, e.g., at least 1 week, e.g., 1, 2, 3, 4, 5, 6, 7, 8, 9, 10, 11, 12, 13, 14, 15, 16, 17, 18, 19, 20, 22, 24, 26, 28, 30, 40, 50, 60 weeks or greater, or 1, 2, 3, 4, 5, 6, 7, 8, 9, 10, 11, 12 months or greater, or 1, 2, 3, 4, 5 years or greater. For example, ofatumumab is administered at a dose and dosing interval described herein for a total of at least 2 doses per treatment cycle (e.g., at least 2, 3, 4, 5, 6, 7, 8, 9, 10, 11, 12, 13, 14, 15, 16, 18, 20, or more doses per treatment cycle).

[0981] In some cases, the anti-CD20 antibody comprises ocrelizumab. Ocrelizumab is a humanized anti-CD20 monoclonal antibody, e.g., as described in Clinical Trials Identifier Nos. NCT00077870, NCT01412333, NCT00779220, NCT00673920, NCT01194570, and Kappos et al. Lancet. 19.378(2011):1779-87.

[0982] In some cases, the anti-CD20 antibody comprises veltuzumab. Veltuzumab is a humanized monoclonal antibody against CD20. See, e.g., Clinical Trial Identifier No. NCT00547066, NCT00546793, NCT01101581, and Goldenberg et al. Leuk Lymphoma. 51(5)(2010):747-55.

[0983] In some cases, the anti-CD20 antibody comprises GA101. GA101 (also called obinutuzumab or R05072759) is a humanized and glyco-engineered anti-CD20 monoclonal antibody. See, e.g., Robak. Curr. Opin. Investig. Drugs. 10.6(2009):588-96; Clinical Trial Identifier Numbers: NCT01995669, NCT01889797, NCT02229422, and NCT01414205; and www.accessdata.fda.gov/drugsatfda_docs/label/2013/125486s0001bl.pdf.

[0984] In some cases, the anti-CD20 antibody comprises AME-133v. AME-133v (also called LY2469298 or ocaratuzumab) is a humanized IgG1 monoclonal antibody against CD20 with increased affinity for the FcγRIIIa receptor and an enhanced antibody dependent cellular cytotoxicity (ADCC) activity compared with rituximab. See, e.g., Robak et al. BioDrugs 25.1(2011):13-25; and Forero-Torres et al. Clin Cancer Res. 18.5(2012):1395-403.

[0985] In some cases, the anti-CD20 antibody comprises PRO131921. PRO131921 is a humanized anti-CD20 monoclonal antibody engineered to have better binding to FcTRIIIa and enhanced ADCC compared with rituximab. See, e.g., Robak et al. BioDrugs 25.1(2011):13-25; and Casulo et al. Clin Immunol. 154.1(2014):37-46; and Clinical Trial Identifier No. NCT00452127.

[0986] In some cases, the anti-CD20 antibody comprises TRU-015. TRU-015 is an anti-CD20 fusion protein derived from domains of an antibody against CD20. TRU-015 is smaller than monoclonal antibodies, but retains Fc-mediated effector functions. See, e.g., Robak et al. BioDrugs 25.1(2011):13-25. TRU-015 contains an anti-CD20 single-chain variable fragment (scFv) linked to human IgG1 hinge, CH2, and CH3 domains but lacks CH1 and CL domains.

[0987] In some embodiments, an anti-CD20 antibody described herein is conjugated or otherwise bound to a therapeutic agent, e.g., a chemotherapeutic agent (e.g., cytoxan, fludarabine, histone deacetylase inhibitor, demethylating agent, peptide vaccine, anti-tumor antibiotic, tyrosine kinase inhibitor, alkylating agent, anti-microtubule or anti-mitotic agent), anti-allergic agent, anti-nausea agent (or anti-emetic), pain reliever, or cytoprotective agent described herein.

[0988] In embodiments, a CAR-expressing cell described herein is administered to a subject in combination with a B-cell lymphoma 2 (BCL-2) inhibitor (e.g., venetoclax, also called ABT-199 or GDC-0199;) and/or rituximab. In embodiments, a CAR-expressing cell described herein is administered to a subject in combination with venetoclax and rituximab. Venetoclax is a small molecule that inhibits the anti-apoptotic protein, BCL-2. Venetoclax has the following chemical name (4-(4-{[2-(4-chlorophenyl)-4,4-dimethylcyclohex-1-en-1-yl]methyl}piperazin-1-yl)-N-({3-nitro-4-[(tetrahydro-2H-pyran-4-ylmethyl)amino]phenyl}sulfonyl)-2-(1H-pyrrolo[2,3-b]pyridin-5-yloxy)benzamide).

[0989] In embodiments, the subject has CLL. In embodiments, the subject has relapsed CLL, e.g., the subject has previously been administered a cancer therapy. In embodiments, venetoclax is administered at a dosage of about 15-600 mg (e.g., 15-20, 20-50, 50-75, 75-100, 100-200, 200-300, 300-400, 400-500, or 500-600 mg), e.g., daily. In embodiments, rituximab is administered at a dosage of about 350-550 mg/m2 (e.g., 350-375, 375-400, 400-425, 425-450, 450-475, or 475-500 mg/m2), e.g., intravenously, e.g., monthly.

[0990] In some embodiments, one or more CAR-expressing cells described herein is administered in combination with an oncolytic virus. In embodiments, oncolytic viruses are capable of selectively replicating in and triggering the death of or slowing the growth of a cancer cell. In some cases, oncolytic viruses have no effect or a minimal effect on non-cancer cells. An oncolytic virus includes but is not limited to an oncolytic adenovirus, oncolytic Herpes Simplex Viruses, oncolytic retrovirus, oncolytic parvovirus, oncolytic vaccinia virus, oncolytic Sinbis virus, oncolytic influenza virus, or oncolytic RNA virus (e.g., oncolytic reovirus, oncolytic Newcastle Disease Virus (NDV), oncolytic measles virus, or oncolytic vesicular stomatitis virus (VSV)).

[0991] In some embodiments, the oncolytic virus is a virus, e.g., recombinant oncolytic virus, described in US2010/0178684 A1, which is incorporated herein by reference in its entirety. In some embodiments, a recombinant oncolytic virus comprises a nucleic acid sequence (e.g., heterologous nucleic acid sequence) encoding an inhibitor of an immune or inflammatory response, e.g., as described in US2010/0178684 A1, incorporated herein by reference in its entirety. In embodiments, the recombinant oncolytic virus, e.g., oncolytic NDV, comprises a pro-apoptotic protein (e.g., apoptin), a cytokine (e.g., GM-CSF, interferon-gamma, interleukin-2 (IL-2), tumor necrosis factor-alpha), an immunoglobulin (e.g., an antibody against ED-B firbonectin), tumor associated antigen, a bispecific adapter protein (e.g., bispecific antibody or antibody fragment directed against NDV HN protein and a T cell co-stimulatory receptor, such as CD3 or CD28; or fusion protein between human IL-2 and single chain antibody directed against NDV HN protein). See, e.g., Zamarin et al. Future Microbiol. 7.3(2012):347-67, incorporated herein by reference in its entirety. In some embodiments, the oncolytic virus is a chimeric oncolytic NDV described in U.S. Pat. No. 8,591,881 B2, US 2012/0122185 A1, or US 2014/0271677 A1, each of which is incorporated herein by reference in their entireties.

[0992] In some embodiments, the oncolytic virus comprises a conditionally replicative adenovirus (CRAd), which is designed to replicate exclusively in cancer cells. See, e.g., Alemany et al. Nature Biotechnol. 18(2000):723-27. In some embodiments, an oncolytic adenovirus comprises one described in Table 1 on page 725 of Alemany et al., incorporated herein by reference in its entirety.

[0993] Exemplary oncolytic viruses include but are not limited to the following:
[0994] Group B Oncolytic Adenovirus (ColoAdl) (PsiOxus Therapeutics Ltd.) (see, e.g., Clinical Trial Identifier: NCT02053220);
[0995] ONCOS-102 (previously called CGTG-102), which is an adenovirus comprising granulocyte-macrophage colony stimulating factor (GM-CSF) (Oncos Therapeutics) (see, e.g., Clinical Trial Identifier: NCT01598129);
[0996] VCN-01, which is a genetically modified oncolytic human adenovirus encoding human PH20 hyaluronidase (VCN Biosciences, S.L.) (see, e.g., Clinical Trial Identifiers: NCT02045602 and NCT02045589);
[0997] Conditionally Replicative Adenovirus ICOVIR-5, which is a virus derived from wild-type human adenovirus serotype 5 (Had5) that has been modified to selectively replicate in cancer cells with a deregulated retinoblastoma/E2F pathway (Institut Català d'Oncologia) (see, e.g., Clinical Trial Identifier: NCT01864759);
[0998] Celyvir, which comprises bone marrow-derived autologous mesenchymal stem cells (MSCs) infected with ICOVIRS, an oncolytic adenovirus (Hospital Infantil Universitario Nino Jesus, Madrid, Spain/Ramon Alemany) (see, e.g., Clinical Trial Identifier: NCT01844661);
[0999] CG0070, which is a conditionally replicating oncolytic serotype 5 adenovirus (Ad5) in which human E2F-1 promoter drives expression of the essential Ela viral genes, thereby restricting viral replication and cytotoxicity to Rb pathway-defective tumor cells (Cold Genesys, Inc.) (see, e.g., Clinical Trial Identifier: NCT02143804); or
[1000] DNX-2401 (formerly named Delta-24-RGD), which is an adenovirus that has been engineered to replicate selectively in retinoblastoma (Rb)-pathway deficient cells and to infect cells that express certain RGD-binding integrins more efficiently (Clinica Universidad de Navarra, Universidad de Navarra/DNAtrix, Inc.) (see, e.g., Clinical Trial Identifier: NCT01956734).

[1001] In some embodiments, an oncolytic virus described herein is administering by injection, e.g., subcutaneous, intra-arterial, intravenous, intramuscular, intrathecal, or intraperitoneal injection. In embodiments, an oncolytic virus described herein is administered intratumorally, transdermally, transmucosally, orally, intranasally, or via pulmonary administration.

[1002] In an embodiment, cells expressing a CAR described herein are administered to a subject in combination with a molecule that decreases the Treg cell population. Methods that decrease the number of (e.g., deplete) Treg cells are known in the art and include, e.g., CD25 depletion, cyclophosphamide administration, modulating GITR function. Without wishing to be bound by theory, it is believed that reducing the number of Treg cells in a subject prior to apheresis or prior to administration of a CAR-expressing cell described herein reduces the number of unwanted immune cells (e.g., Tregs) in the tumor microenvironment and reduces the subject's risk of relapse.

[1003] In an embodiment, a CAR-expressing cell described herein is administered to a subject in combination with a molecule that decreases the Treg cell population. Methods that decrease the number of (e.g., deplete) Treg cells are known in the art and include, e.g., CD25 depletion, cyclophosphamide administration, and modulating GITR function. Without wishing to be bound by theory, it is believed that reducing the number of Treg cells in a subject prior to apheresis or prior to administration of a CAR-expressing cell described herein reduces the number of unwanted immune cells (e.g., Tregs) in the tumor microenvironment and reduces the subject's risk of relapse. In one embodiment, CAR-expressing cells described herein are administered to a subject in combination with a molecule targeting GITR and/or modulating GITR functions, such as a GITR agonist and/or a GITR antibody that depletes regulatory T cells (Tregs). In one embodiment, CAR-expressing cells described herein are administered to a subject in combination with cyclophosphamide. In one embodiment, the GITR binding molecule and/or molecule modulating GITR function (e.g., GITR agonist and/or Treg depleting GITR antibodies) is administered prior to the CAR-expressing cells. For example, in one embodiment, the GITR agonist can be administered prior to apheresis of the cells. In embodiments, cyclophosphamide is administered to the subject prior to administration (e.g., infusion or re-infusion) of the CAR-expressing cell or prior to apheresis of the cells. In embodiments, cyclophosphamide and an anti-GITR antibody are administered to the subject prior to administration (e.g., infusion or re-infusion) of the CAR-expressing cell or prior to apheresis of the cells. In one embodiment, the subject has cancer (e.g., a solid cancer or a hematological cancer such as ALL or CLL). In one embodiment, the subject has CLL. In embodiments, the subject has a solid cancer, e.g., a solid cancer described herein.

[1004] In one embodiment, the combination of a CD19 CAR expressing cell described herein and one or more B-cell inhibitor described herein is administered to a subject in combination with a GITR agonist, e.g., a GITR agonist described herein. In one embodiment, the GITR agonist is administered prior to the CAR-expressing cell, e.g., CD19 CAR-expressing cells. For example, in one embodiment, the GITR agonist can be administered prior to apheresis of the cells. In one embodiment, the subject has CLL.

[1005] In one embodiment, a CAR expressing cell described herein is administered to a subject in combination with a GITR agonist, e.g., a GITR agonist described herein. In one embodiment, the GITR agonist is administered prior to the CAR-expressing cell. For example, in one embodiment, the GITR agonist can be administered prior to apheresis of the cells.

[1006] Exemplary GITR agonists include, e.g., GITR fusion proteins and anti-GITR antibodies (e.g., bivalent anti-GITR antibodies) such as, e.g., a GITR fusion protein described in U.S. Pat. No. 6,111,090, European Patent No.: 090505B1, U.S. Pat. No. 8,586,023, PCT Publication Nos.: WO 2010/003118 and 2011/090754, or an anti-GITR antibody described, e.g., in U.S. Pat. No. 7,025,962, European Patent No.: 1947183B1, U.S. Pat. Nos. 7,812,135, 8,388,967, 8,591,886, European Patent No.: EP 1866339, PCT Publication No.: WO 2011/028683, PCT Publication No.: WO 2013/039954, PCT Publication No.: WO2005/007190, PCT Publication No.: WO 2007/133822, PCT Publication No.: WO2005/055808, PCT Publication No.: WO 99/40196, PCT Publication No.: WO 2001/03720, PCT Publication No.: WO99/20758, PCT Publication No.: WO2006/083289, PCT Publication No.: WO 2005/115451, U.S. Pat. No. 7,618,632, and PCT Publication No.: WO 2011/051726.

[1007] In one embodiment, a CAR expressing cell described herein is administered to a subject in combination with a protein tyrosine phosphatase inhibitor, e.g., a protein tyrosine phosphatase inhibitor described herein. In one embodiment, the protein tyrosine phosphatase inhibitor is an SHP-1 inhibitor, e.g., an SHP-1 inhibitor described herein, such as, e.g., sodium stibogluconate. In one embodiment, the protein tyrosine phosphatase inhibitor is an SHP-2 inhibitor, e.g., an SHP-2 inhibitor described herein.

[1008] In one embodiment, a CAR-expressing cell described herein optionally in combination with one or more B-cell inhibitor can be used in combination with a kinase inhibitor. In one embodiment, the kinase inhibitor is a CDK4 inhibitor, e.g., a CDK4 inhibitor described herein, e.g., a CD4/6 inhibitor, such as, e.g., 6-Acetyl-8-cyclopentyl-5-methyl-2-(5-piperazin-1-yl-pyridin-2-ylamino)-8H-pyrido[2,3-d]pyrimidin-7-one, hydrochloride (also referred to as palbociclib or PD0332991). In one embodiment, the kinase inhibitor is a BTK inhibitor, e.g., a BTK inhibitor described herein, such as, e.g., ibrutinib. In one embodiment, the kinase inhibitor is an mTOR inhibitor, e.g., an mTOR inhibitor described herein, such as, e.g., rapamycin, a rapamycin analog, OSI-027. The mTOR inhibitor can be, e.g., an mTORC1 inhibitor and/or an mTORC2 inhibitor, e.g., an mTORC1 inhibitor and/or mTORC2 inhibitor described herein. In one embodiment, the kinase inhibitor is a MNK inhibitor, e.g., a MNK inhibitor described herein, such as, e.g., 4-amino-5-(4-fluoroanilino)-pyrazolo [3,4-d]pyrimidine. The MNK inhibitor can be, e.g., a MNKla, MNK1b, MNK2a and/or MNK2b inhibitor.

[1009] In one embodiment, the kinase inhibitor is a CDK4 inhibitor selected from aloisine A; flavopiridol or HMR-1275, 2-(2-chlorophenyl)-5,7-dihydroxy-8-[(3S,4R)-3-hydroxy-1-methyl-4-piperidinyl]-4-chromenone; crizotinib (PF-02341066; 2-(2-Chlorophenyl)-5,7-dihydroxy-8-[(2R,3S)-2-(hydroxymethyl)-1-methyl-3-pyrrolidinyl]-4H-1-benzopyran-4-one, hydrochloride (P276-00); 1-methyl-5-[[2-[5-(trifluoromethyl)-1H-imidazol-2-yl]-4-pyridinyl]oxy]-N-[4-(trifluoromethyl)phenyl]-1H-benzimidazol-2-amine (RAF265); indisulam (E7070); roscovitine (CYC202); palbociclib (PD0332991); dinaciclib (SCH727965); N-[5-[[(5-tert-butyloxazol-2-yl)methyl]thio]thiazol-2-yl]piperidine-4-carboxamide (BMS 387032); 4-[[9-chloro-7-(2,6-difluorophenyl)-5H-pyrimido[5,4-d][2]benzazepin-2-yl]amino]-benzoic acid (MLN8054); 5-[3-(4,6-difluoro-1H-benzimidazol-2-yl)-1H-indazol-5-yl]-N-ethyl-4-methyl-3-pyridinemethanamine (AG-024322); 4-(2,6-dichlorobenzoylamino)-1H-pyrazole-3-carboxylic acid N-(piperidin-4-yl)amide (AT7519); 4-[2-methyl-1-(1-methylethyl)-1H-imidazol-5-yl]-N-[4-(methylsulfonyl)phenyl]-2-pyrimidinamine (AZD5438); and XL281 (BMS908662).

[1010] In one embodiment, the kinase inhibitor is a CDK4 inhibitor, e.g., palbociclib (PD0332991), and the palbociclib is administered at a dose of about 50 mg, 60 mg, 70 mg, 75 mg, 80 mg, 90 mg, 100 mg, 105 mg, 110 mg, 115 mg, 120 mg, 125 mg, 130 mg, 135 mg (e.g., 75 mg, 100 mg or 125 mg) daily for a period of time, e.g., daily for 14-21 days of a 28 day cycle, or daily for 7-12 days of a 21 day cycle. In one embodiment, 1, 2, 3, 4, 5, 6, 7, 8, 9, 10, 11, 12 or more cycles of palbociclib are administered.

[1011] In embodiments, a CAR-expressing cell described herein is administered to a subject in combination with a cyclin-dependent kinase (CDK) 4 or 6 inhibitor, e.g., a CDK4 inhibitor or a CDK6 inhibitor described herein. In embodiments, a CAR-expressing cell described herein is administered to a subject in combination with a CDK4/6 inhibitor (e.g., an inhibitor that targets both CDK4 and CDK6), e.g., a CDK4/6 inhibitor described herein. In an embodiment, the subject has MCL. MCL is an aggressive cancer that is poorly responsive to currently available therapies, i.e., essentially incurable. In many cases of MCL, cyclin D1 (a regulator of CDK4/6) is expressed (e.g., due to chromosomal translocation involving immunoglobulin and Cyclin D1 genes) in MCL cells. Thus, without being bound by theory, it is thought that MCL cells are highly sensitive to CDK4/6 inhibition with high specificity (i.e., minimal effect on normal immune cells). CDK4/6 inhibitors alone have had some efficacy in treating MCL, but have only achieved partial remission with a high relapse rate. An exemplary CDK4/6 inhibitor is LEE011 (also called ribociclib).

[1012] Without being bound by theory, it is believed that administration of a CAR-expressing cell described herein with a CDK4/6 inhibitor (e.g., LEE011 or other CDK4/6 inhibitor described herein) can achieve higher responsiveness, e.g., with higher remission rates and/or lower relapse rates, e.g., compared to a CDK4/6 inhibitor alone.

[1013] In one embodiment, the kinase inhibitor is a BTK inhibitor selected from ibrutinib (PCI-32765); GDC-0834; RN-486; CGI-560; CGI-1764; HM-71224; CC-292; ONO-4059; CNX-774; and LFM-A13. In an embodiment, the BTK inhibitor does not reduce or inhibit the kinase activity of interleukin-2-inducible kinase (ITK), and is selected from GDC-0834; RN-486; CGI-560; CGI-1764; HM-71224; CC-292; ONO-4059; CNX-774; and LFM-A13.

[1014] In one embodiment, the kinase inhibitor is a BTK inhibitor, e.g., ibrutinib (PCI-32765). In embodiments, a CAR-expressing cell described herein is administered to a subject in combination with a BTK inhibitor (e.g., ibrutinib). In embodiments, a CAR-expressing cell described herein is administered to a subject in combination with ibrutinib (also called PCI-32765). The chemical name of ibrutinib is (1-[(3R)-3-[4-Amino-3-(4-phenoxyphenyl)-1H-pyrazolo[3,4-d]pyrimidin-1-yl]piperidin-1-yl]prop-2-en-1-one).

[1015] In embodiments, the subject has CLL, mantle cell lymphoma (MCL), or small lymphocytic lymphoma (SLL). For example, the subject has a deletion in the short arm of chromosome 17 (del(17p), e.g., in a leukemic cell). In other examples, the subject does not have a del(17p). In embodiments, the subject has relapsed CLL or SLL, e.g., the subject has previously been administered a cancer therapy (e.g., previously been administered one, two, three, or four prior cancer therapies). In embodiments, the subject has refractory CLL or SLL. In other embodiments, the subject has follicular lymphoma, e.g., relapse or refractory follicular lymphoma. In one embodiment, the kinase inhibitor is a BTK inhibitor, e.g., ibrutinib (PCI-32765), and the ibrutinib is administered at a dose of about 250 mg, 300 mg, 350 mg, 400 mg, 420 mg, 440 mg, 460 mg, 480 mg, 500 mg, 520 mg, 540 mg, 560 mg, 580 mg, 600 mg (e.g., 250 mg, 420 mg or 560 mg) daily for a period of time, e.g., daily for 21 day cycle, or daily for 28 day cycle. In one embodiment, 1, 2, 3, 4, 5, 6, 7, 8, 9, 10, 11, 12 or more cycles of ibrutinib are administered. In some embodiments, ibrutinib is administered in combination with rituximab. See, e.g., Burger et al. (2013) Ibrutinib In Combination With Rituximab (iR) Is Well Tolerated and Induces a High Rate Of Durable Remissions In Patients With High-Risk Chronic Lymphocytic Leukemia (CLL): New, Updated Results Of a Phase II Trial In 40 Patients, Abstract 675 presented at 55^{th} ASH Annual Meeting and Exposition, New Orleans, LA 7-10 Dec. Without being bound by theory, it is thought that the addition of ibrutinib enhances the T cell proliferative response and may shift T cells from a T-helper-2 (Th2) to T-helper-1 (Th1) phenotype. Th1 and Th2 are phenotypes of helper T cells, with Th1 versus Th2 directing different immune response pathways. A Th1 phenotype is associated with proinflammatory responses, e.g., for killing cells, such as intracellular pathogens/viruses or cancerous cells, or perpetuating autoimmune responses. A Th2 phenotype is associated with eosinophil accumulation and anti-inflammatory responses. In some embodiments of the methods, uses, and compositions herein, the BTK inhibitor is a BTK inhibitor described in International Application WO/2015/079417, which is herein incorporated by reference in its entirety. For instance, in some embodiments, the BTK inhibitor is a compound of formula (I) or a pharmaceutically acceptable salt thereof;

[chemical structure]

[1016] wherein,
[1017] R1 is hydrogen, C1-C6 alkyl optionally substituted by hydroxy;
[1018] R2 is hydrogen or halogen;
[1019] R3 is hydrogen or halogen;
[1020] R4 is hydrogen;
[1021] R5 is hydrogen or halogen;
[1022] or R4 and R5 are attached to each other and stand for a bond, —CH2—, —CH2—CH2—, —CH═CH—, —CH═CH—CH2—; —CH2—CH═CH—; or —CH2—CH2—CH2—;
[1023] R6 and R7 stand independently from each other for H, C1-C6 alkyl optionally substituted by hydroxyl, C3-C6 cycloalkyl optionally substituted by halogen or hydroxy, or halogen;
[1024] R8, R9, R, R′, R10 and R11 independently from each other stand for H, or C1-C6 alkyl optionally substituted by C1-C6 alkoxy; or any two of R8, R9, R, R′, R10 and R11 together with the carbon atom to which they are bound may form a 3-6 membered saturated carbocyclic ring;
[1025] R12 is hydrogen or C1-C6 alkyl optionally substituted by halogen or C1-C6 alkoxy;
[1026] or R12 and any one of R8, R9, R, R′, R10 or R11 together with the atoms to which they are bound may form a 4, 5, 6 or 7 membered azacyclic ring, which ring may optionally be substituted by halogen, cyano, hydroxyl, C1-C6 alkyl or C1-C6 alkoxy;
[1027] n is 0 or 1; and
[1028] R13 is C2-C6 alkenyl optionally substituted by C1-C6 alkyl, C1-C6 alkoxy or N,N-di-C1-C6 alkyl amino; C2-C6 alkynyl optionally substituted by C1-C6 alkyl or C1-C6 alkoxy; or C2-C6 alkylenyl oxide optionally substituted by C1-C6 alkyl.

[1029] In some embodiments, the BTK inhibitor of Formula I is chosen from: N-(3-(5-((1-Acryloylazetidin-3-yl)oxy)-6-aminopyrimidin-4-yl)-5-fluoro-2-methylphenyl)-4-cyclopropyl-2-fluorobenzamide; (E)-N-(3-(6-Amino-5-((1-(but-2-enoyl)azetidin-3-yl)oxy)pyrimidin-4-yl)-5-fluoro-2-methylphenyl)-4-cyclopropyl-2-fluorobenzamide; N-(3-(6-Amino-5-((1-propioloylazetidin-3-yl)oxy)pyrimidin-4-yl)-5-fluoro-2-methylphenyl)-4-cyclopropyl-2-fluorobenzamide; N-(3-(6-Amino-5-((1-(but-2-ynoyl)azetidin-3-yl)oxy)pyrimidin-4-yl)-5-fluoro-2-methylphenyl)-4-cyclopropyl-2-fluorobenzamide; N-(3-(5-((1-Acryloylpiperidin-4-yl)oxy)-6-aminopyrimidin-4-yl)-5-fluoro-2-methylphenyl)-4-cyclopropyl-2-fluorobenzamide; N-(3-(6-Amino-5-(2-(N-methylacrylamido)ethoxy)pyrimidin-4-yl)-5-fluoro-2-methylphenyl)-4-cyclopropyl-2-fluorobenzamide; (E)-N-(3-(6-Amino-5-(2-(N-methylbut-2-enamido)ethoxy)pyrimidin-4-yl)-5-fluoro-2-methylphenyl)-4-cyclopropyl-2-fluorobenzamide; N-(3-(6-Amino-5-(2-(N-methylpropiolamido)ethoxy)pyrimidin-4-yl)-5-fluoro-2-methylphenyl)-4-cyclopropyl-2-fluorobenzamide; (E)-N-(3-(6-Amino-5-(2-(4-methoxy-N-methylbut-2-enamido)ethoxy)pyrimidin-4-yl)-5-fluoro-2-methylphenyl)-4-cyclopropyl-2-fluorobenzamide; N-(3-(6-Amino-5-(2-(N-methylbut-2-ynamido)ethoxy)pyrimidin-4-yl)-5-fluoro-2-methylphenyl)-4-cyclopropyl-2-fluorobenzamide; N-(2-((4-Amino-6-(3-(4-cyclopropyl-2-fluorobenzamido)-5-fluoro-2-methylphenyl)pyrimidin-5-yl)oxy)ethyl)-N-methyloxirane-2-carboxamide; N-(2-((4-Amino-6-(3-(6-cyclopropyl-8-fluoro-1-oxoisoquinolin-2(1H)-yl)phenyl)pyrimidin-5-yl)oxy)ethyl)-N-methylacrylamide; N-(3-(5-(2-Acrylamidoethoxy)-6-aminopyrimidin-4-yl)-5-fluoro-2-methylphenyl)-4-cyclopropyl-2-fluorobenzamide; N-(3-(6-Amino-5-(2-(N-ethylacrylamido)ethoxy)pyrimidin-4-yl)-5-fluoro-2-methylphenyl)-4-cyclopropyl-2-fluorobenzamide; N-(3-(6-Amino-5-(2-(N-(2-fluoroethyl)acrylamido)ethoxy)pyrimidin-4-yl)-5-fluoro-2-methylphenyl)-4-cyclopropyl-2-fluorobenzamide; N-(3-(5-((1-Acrylamidocyclopropyl)methoxy)-6-aminopyrimidin-4-yl)-5-fluoro-2-methylphenyl)-4-cyclopropyl-2-fluorobenzamide; (S)-N-(3-(5-(2-Acrylamidopropoxy)-6-aminopyrimidin-4-yl)-5-fluoro-2-methylphenyl)-4-cyclopropyl-2-fluorobenzamide; (S)-N-(3-(6-Amino-5-(2-(but-2-ynamido)propoxy)pyrimidin-4-yl)-5-fluoro-2-methylphenyl)-4-cyclopropyl-2-fluorobenzamide; (S)-N-(3-(6-Amino-5-(2-(N-methylacrylamido)propoxy)pyrimidin-4-yl)-5-fluoro-2-methylphenyl)-4-cyclopropyl-2-fluorobenzamide; (S)-N-(3-(6-Amino-5-(2-(N-methylbut-2-ynamido)propoxy)pyrimidin-4-yl)-5-fluoro-2-methylphenyl)-4-cyclopropyl-2-fluorobenzamide; N-(3-(6-Amino-5-(3-(N-methylacrylamido)propoxy)pyrimidin-4-yl)-5-fluoro-2-methylphenyl)-4-cyclopropyl-2-fluorobenzamide; (S)-N-(3-(5-((1-Acryloylpyrrolidin-2-yl)methoxy)-6-aminopyrimidin-4-yl)-5-fluoro-2-methylphenyl)-4-cyclopropyl-2-fluorobenzamide; (S)-N-(3-(6-Amino-5-((1-(but-2-ynoyl)pyrrolidin-2-yl)methoxy)pyrimidin-4-yl)-5-fluoro-2-methylphenyl)-4-cyclopropyl-2-fluorobenzamide; (S)-2-(3-(5-((1-Acryloylpyrrolidin-2-yl)methoxy)-6-aminopyrimidin-4-yl)-5-fluoro-2-(hydroxymethyl)phenyl)-6-cyclopropyl-3,4-dihydroisoquinolin-1(2H)-one; N-(2-((4-Amino-6-(3-(6-cyclopropyl-1-oxo-3,4-dihydroisoquinolin-2(1H)-yl)-5-fluoro-2-(hydroxymethyl)phenyl)pyrimidin-5-yl)oxy)ethyl)-N-methylacrylamide; N-(3-(5-(((2S,4R)-1-Acryloyl-4-methoxypyrrolidin-2-yl)methoxy)-6-aminopyrimidin-4-yl)-5-fluoro-2-methylphenyl)-4-cyclopropyl-2-fluorobenzamide; N-(3-(6-Amino-5-(((2S,4R)-1-(but-2-ynoyl)-4-methoxypyrrolidin-2-yl)methoxy)pyrimidin-4-yl)-5-fluoro-2-methylphenyl)-4-cyclopropyl-2-fluorobenzamide; 2-(3-(5-(((2S,4R)-1-Acryloyl-4-methoxypyrrolidin-2-yl)methoxy)-6-aminopyrimidin-4-yl)-5-fluoro-2-(hydroxymethyl)phenyl)-6-cyclopropyl-3,4-dihydroisoquinolin-1(2H)-one; N-(3-(5-(((2S,4S)-1-Acryloyl-4-methoxypyrrolidin-2-yl)methoxy)-6-aminopyrimidin-4-yl)-5-fluoro-2-methylphenyl)-4-cyclopropyl-2-fluorobenzamide; N-(3-(6-Amino-5-(((2S,4S)-1-(but-2-ynoyl)-4-methoxypyrrolidin-2-yl)methoxy)pyrimidin-4-yl)-5-fluoro-2-methylphenyl)-4-cyclopropyl-2-fluorobenzamide; N-(3-(5-(((2S,4R)-1-Acryloyl-4-fluoropyrrolidin-2-yl)methoxy)-6-aminopyrimidin-4-yl)-5-fluoro-2-methylphenyl)-4-cyclopropyl-2-fluorobenzamide; N-(3-(6-Amino-5-(((2S,4R)-1-(but-2-ynoyl)-4-fluoropyrrolidin-2-yl)methoxy)pyrimidin-4-yl)-5-fluoro-2-methylphenyl)-4-cyclopropyl-2-fluorobenzamide; (S)-N-(3-(5-((1-Acryloylazetidin-2-yl)methoxy)-6-aminopyrimidin-4-yl)-5-fluoro-2-methylphenyl)-4-cyclopropyl-2-fluorobenzamide; (S)-N-(3-(6-Amino-5-((1-propioloylazetidin-2-yl)methoxy)pyrimidin-4-yl)-5-fluoro-2-methylphenyl)-4-cyclopropyl-2-fluorobenzamide; (S)-2-(3-(5-((1-Acryloylazetidin-2-yl)methoxy)-6-aminopyrimidin-4-yl)-5-fluoro-2-(hydroxymethyl)phenyl)-6-cyclopropyl-3,4-dihydroisoquinolin-1(2H)-one; (R)-N-(3-(5-((1-Acryloylazetidin-2-yl)methoxy)-6-aminopyrimidin-4-yl)-5-fluoro-2-methylphenyl)-4-cyclopropyl-2-fluorobenzamide; (R)-N-(3-(5-((1-Acryloylpiperidin-3-yl)methoxy)-6-aminopyrimidin-4-yl)-5-fluoro-2-methylphenyl)-4-cyclopropyl-2-fluorobenzamide; N-(3-(5-(((2R,3S)-1-Acryloyl-3-methoxypyrrolidin-2-yl)methoxy)-6-aminopyrimidin-4-yl)-5-fluoro-2-methylphenyl)-4-cyclopropyl-2-fluorobenzamide; N-(3-(5-(((2S,4R)-1-Acryloyl-4-cyanopyrrolidin-2-yl)methoxy)-6-aminopyrimidin-4-yl)-5-fluoro-2-methylphenyl)-4-cyclopropyl-2-fluorobenzamide; or N-(3-(5-(((2S,4S)-1-Acryloyl-4-cyanopyrrolidin-2-yl)methoxy)-6-aminopyrimidin-4-yl)-5-fluoro-2-methylphenyl)-4-cyclopropyl-2-fluorobenzamide.

[1030] Unless otherwise provided, the chemical terms used above in describing the BTK inhibitor of Formula I are used according to their meanings as set out in International Application WO/2015/079417, which is herein incorporated by reference in its entirety.

[1031] In one embodiment, the kinase inhibitor is an mTOR inhibitor selected from temsirolimus; ridaforolimus (1R,2R,4S)-4-[(2R)-2 [(1R,9S,12S,15R,16E,18R,19R,21R, 23S,24E,26E,28Z,30S,32S,35R)-1,18-dihydroxy-19,30-dimethoxy-15,17,21,23, 29,35-hexamethyl-2,3,10,14,20-pentaoxo-11,36-dioxa-4-azatricyclo[30.3.1.0⁴⁻⁹]hexatriaconta-16,24,26,28-tetraen-12-yl]propyl]-2-methoxycyclohexyl dimethylphosphinate, also known as AP23573 and MK8669; everolimus (RAD001); rapamycin (AY22989); simapimod; (5-{2,4-bis[(3S)-3-methylmorpholin-4-yl]pyrido[2,3-d]pyrimidin-7-yl}-2-methoxyphenyl)methanol (AZD8055); 2-amino-8-[trans-4-(2-hydroxyethoxy)cyclohexyl]-6-(6-methoxy-3-pyridinyl)-4-methyl-pyrido[2,3-d]pyrimidin-7(8H)-one (PF04691502); and N²-[1,4-dioxo-4-[[4-(4-oxo-8-phenyl-4H-1-benzopyran-2-yl)morpholinium-4-yl]methoxy]butyl]-L-arginylglycyl-L-α-aspartylL-serine-, inner salt (SF1126) (SEQ ID NO: 1316); and XL765.

[1032] In one embodiment, the kinase inhibitor is an mTOR inhibitor, e.g., rapamycin, and the rapamycin is administered at a dose of about 3 mg, 4 mg, 5 mg, 6 mg, 7 mg, 8 mg, 9 mg, 10 mg (e.g., 6 mg) daily for a period of time, e.g., daily for 21 day cycle cycle, or daily for 28 day cycle. In one embodiment, 1, 2, 3, 4, 5, 6, 7, 8, 9, 10, 11, 12 or more cycles of rapamycin are administered. In one embodiment, the kinase inhibitor is an mTOR inhibitor, e.g., everolimus and the everolimus is administered at a dose of about 2 mg, 2.5 mg, 3 mg, 4 mg, 5 mg, 6 mg, 7 mg, 8 mg, 9 mg, 10 mg, 11 mg, 12 mg, 13 mg, 14 mg, 15 mg (e.g., 10 mg) daily for a period of time, e.g., daily for 28 day cycle. In one embodiment, 1, 2, 3, 4, 5, 6, 7, 8, 9, 10, 11, 12 or more cycles of everolimus are administered.

[1033] In one embodiment, the kinase inhibitor is an MNK inhibitor selected from CGP052088; 4-amino-3-(p-fluorophenylamino)-pyrazolo [3,4-d]pyrimidine (CGP57380); cercosporamide; ETC-1780445-2; and 4-amino-5-(4-fluoroanilino)-pyrazolo [3,4-d]pyrimidine.

[1034] In embodiments, a CAR-expressing cell described herein is administered to a subject in combination with a phosphoinositide 3-kinase (PI3K) inhibitor (e.g., a PI3K inhibitor described herein, e.g., idelalisib or duvelisib) and/or rituximab. In embodiments, a CAR-expressing cell described herein is administered to a subject in combination with idelalisib and rituximab. In embodiments, a CAR-expressing cell described herein is administered to a subject in combination with duvelisib and rituximab. Idelalisib (also called GS-1101 or CAL-101; Gilead) is a small molecule that blocks the delta isoform of PI3K. The chemical name for idelalisib is (5-Fluoro-3-phenyl-2-[(1S)-1-(7H-purin-6-ylamino)propyl]-4(3H)-quinazolinone).

[1035] Duvelisib (also called IPI-145; Infinity Pharmaceuticals and Abbvie) is a small molecule that blocks PI3K-δ,γ. The chemical name for duvelisib is (8-Chloro-2-phenyl-3-[(1S)-1-(9H-purin-6-ylamino)ethyl]-1(2H)-isoquinolinone).

[1036] In embodiments, the subject has CLL. In embodiments, the subject has relapsed CLL, e.g., the subject has previously been administered a cancer therapy (e.g., previously been administered an anti-CD20 antibody or previously been administered ibrutinib). For example, the subject has a deletion in the short arm of chromosome 17 (del(17p), e.g., in a leukemic cell). In other examples, the subject does not have a del(17p). In embodiments, the subject comprises a leukemic cell comprising a mutation in the immunoglobulin heavy-chain variable-region (IgV_{H}) gene. In other embodiments, the subject does not comprise a leukemic cell comprising a mutation in the immunoglobulin heavy-chain variable-region (IgV_{H}) gene. In embodiments, the subject has a deletion in the long arm of chromosome 11 (del(11q)). In other embodiments, the subject does not have a del(11q). In embodiments, idelalisib is administered at a dosage of about 100-400 mg (e.g., 100-125, 125-150, 150-175, 175-200, 200-225, 225-250, 250-275, 275-300, 325-350, 350-375, or 375-400 mg), e.g., BID. In embodiments, duvelisib is administered at a dosage of about 15-100 mg (e.g., about 15-25, 25-50, 50-75, or 75-100 mg), e.g., twice a day. In embodiments, rituximab is administered at a dosage of about 350-550 mg/m² (e.g., 350-375, 375-400, 400-425, 425-450, 450-475, or 475-500 mg/m²), e.g., intravenously.

[1037] In one embodiment, the kinase inhibitor is a dual phosphatidylinositol 3-kinase (PI3K) and mTOR inhibitor selected from 2-Amino-8-[trans-4-(2-hydroxyethoxy)cyclohexyl]-6-(6-methoxy-3-pyridinyl)-4-methyl-pyrido[2,3-d]pyrimidin-7(8H)-one (PF-04691502); N-[4-[[4-(Dimethylamino)-1-piperidinyl]carbonyl]phenyl]-N′-[4-(4,6-di-4-morpholinyl-1,3,5-triazin-2-yl)phenyl]urea (PF-05212384, PKI-587); 2-Methyl-2-{4-[3-methyl-2-oxo-8-(quinolin-3-yl)-2,3-dihydro-1H-imidazo[4,5-c]quinolin-1-yl]phenyl}propanenitrile (BEZ-235); apitolisib (GDC-0980, RG7422); 2,4-Difluoro-N-{2-(methyloxy)-5-[4-(4-pyridazinyl)-6-quinolinyl]-3-pyridinyl}benzenesulfonamide (GSK2126458); 8-(6-methoxypyridin-3-yl)-3-methyl-1-(4-(piperazin-1-yl)-3-(trifluoromethyl)phenyl)-1H-imidazo[4,5-c]quinolin-2(3H)-one Maleic acid (NVP-BGT226); 3-[4-(4-Morpholinylpyrido[3′, 2′: 4,5]furo[3,2-d]pyrimidin-2-yl]phenol (PI-103); 5-(9-isopropyl-8-methyl-2-morpholino-9H-purin-6-yl)pyrimidin-2-amine (VS-5584, SB2343); and N-[2-[(3,5-Dimethoxyphenyl)amino]quinoxalin-3-yl]-4-[(4-methyl-3-methoxyphenyl)carbonyl]aminophenylsulfonamide (XL765).

[1038] In embodiments, a CAR-expressing cell described herein is administered to a subject in combination with an anaplastic lymphoma kinase (ALK) inhibitor. Exemplary ALK kinases include but are not limited to crizotinib (Pfizer), ceritinib (Novartis), alectinib (Chugai), brigatinib (also called AP26113; Ariad), entrectinib (Ignyta), PF-06463922 (Pfizer), TSR-O11 (Tesaro) (see, e.g., Clinical Trial Identifier No. NCT02048488), CEP-37440 (Teva), and X-396 (Xcovery). In some embodiments, the subject has a solid cancer, e.g., a solid cancer described herein, e.g., lung cancer.

[1039] The chemical name of crizotinib is 3-[(1R)-1-(2,6-dichloro-3-fluorophenyl)ethoxy]-5-(1-piperidin-4-ylpyrazol-4-yl)pyridin-2-amine. The chemical name of ceritinib is 5-Chloro-N²-[2-isopropoxy-5-methyl-4-(4-piperidinyl)phenyl]-N⁴-[2-(isopropylsulfonyl)phenyl]-2,4-pyrimidinediamine. The chemical name of alectinib is 9-ethyl-6,6-dimethyl-8-(4-morpholinopiperidin-1-yl)-11-oxo-6,11-dihydro-5H-benzo[b]carbazole-3-carbonitrile. The chemical name of brigatinib is 5-Chloro-N²-{4-[4-(dimethylamino)-1-piperidinyl]-2-methoxyphenyl}-N⁴-[2-(dimethylphosphoryl)phenyl]-2,4-pyrimidinediamine. The chemical name of entrectinib is N-(5-(3,5-difluorobenzyl)-1H-indazol-3-yl)-4-(4-methylpiperazin-1-yl)-2-((tetrahydro-2H-pyran-4-yl)amino)benzamide. The chemical name of PF-06463922 is (10R)-7-Amino-12-fluoro-2,10,16-trimethyl-15-oxo-10,15,16,17-tetrahydro-2H-8,4-(metheno)pyrazolo[4,3-h][2,5,11]-benzoxadiazacyclotetradecine-3-carbonitrile. The chemical structure of CEP-37440 is (S)-2-((5-chloro-2-((6-(4-(2-hydroxyethyl)piperazin-1-yl)-1-methoxy-6,7, 8,9-tetrahydro-5H-benzo1[7]annulen-2-yl)amino)pyrimidin-4-yl)amino)-N-methylbenzamide. The chemical name of X-396 is (R)-6-amino-5-(1-(2,6-dichloro-3-fluorophenyl)ethoxy)-N-(4-(4-methylpiperazine-1-carbonyl)phenyl)pyridazine-3-carboxamide.

[1040] In one embodiment, the kinase inhibitor is an ITK inhibitor selected from ibrutinib; N-(5-(5-(4-Acetylpiperazine-1-carbonyl)-4-methoxy-2-methylphenylthio)thiazol-2-yl)-4-((3,3-dimethylbutan-2-ylamino)methyl)benzamide (BMS-509744); 7-benzyl-1-(3-(piperidin-1-yl)propyl)-2-(4-(pyridin-4-yl)phenyl)-1H-imidazo[4,5-g]quinoxalin-6(5H)-one (CTA056); R)-3-(1-(1-Acryloylpiperidin-3-yl)-4-amino-1H-pyrazolo[3,4-d]pyrimidin-3-yl)-N-(3-methyl-4-(1-methylethyl))benzamide (PF-06465469).

[1041] Drugs that inhibit either the calcium dependent phosphatase calcineurin (cyclosporine and FK506) or inhibit the p70S6 kinase that is important for growth factor induced signaling (rapamycin). (Liu et al., Cell 66:807-815, 1991; Henderson et al., Immun. 73:316-321, 1991; Bierer et al., Curr. Opin. Immun. 5:763-773, 1993) can also be used. In a further aspect, the cell compositions of the present invention may be administered to a patient in conjunction with (e.g., before, simultaneously or following) bone marrow transplantation, T cell ablative therapy using chemotherapy agents such as, fludarabine, external-beam radiation therapy (XRT), cyclophosphamide, and/or antibodies such as OKT3 or CAMPATH. In one aspect, the cell compositions of the present invention are administered following B-cell ablative therapy such as agents that react with CD20, e.g., Rituxan. For example, in one embodiment, subjects may undergo standard treatment with high dose chemotherapy followed by peripheral blood stem cell transplantation. In certain embodiments, following the transplant, subjects receive an infusion of the expanded immune cells of the present invention. In an additional embodiment, expanded cells are administered before or following surgery.

[1042] In embodiments, a CAR-expressing cell described herein is administered to a subject in combination with an indoleamine 2,3-dioxygenase (IDO) inhibitor. IDO is an enzyme that catalyzes the degradation of the amino acid, L-tryptophan, to kynurenine. Many cancers overexpress IDO, e.g., prostatic, colorectal, pancreatic, cervical, gastric, ovarian, head, and lung cancer. pDCs, macrophages, and dendritic cells (DCs) can express IDO. Without being bound by theory, it is thought that a decrease in L-tryptophan (e.g., catalyzed by IDO) results in an immunosuppressive milieu by inducing T-cell anergy and apoptosis. Thus, without being bound by theory, it is thought that an IDO inhibitor can enhance the efficacy of a CAR-expressing cell described herein, e.g., by decreasing the suppression or death of a CAR-expressing immune cell. In embodiments, the subject has a solid tumor, e.g., a solid tumor described herein, e.g., prostatic, colorectal, pancreatic, cervical, gastric, ovarian, head, or lung cancer. Exemplary inhibitors of IDO include but are not limited to 1-methyl-tryptophan, indoximod (NewLink Genetics) (see, e.g., Clinical Trial Identifier Nos. NCT01191216; NCT01792050), and INCB024360 (Incyte Corp.) (see, e.g., Clinical Trial Identifier Nos. NCT01604889; NCT01685255)

[1043] In embodiments, a CAR-expressing cell described herein is administered to a subject in combination with a modulator of myeloid-derived suppressor cells (MDSCs). MDSCs accumulate in the periphery and at the tumor site of many solid tumors. These cells suppress T cell responses, thereby hindering the efficacy of CAR-expressing cell therapy. Without being bound by theory, it is thought that administration of a MDSC modulator enhances the efficacy of a CAR-expressing cell described herein. In an embodiment, the subject has a solid tumor, e.g., a solid tumor described herein, e.g., glioblastoma. Exemplary modulators of MDSCs include but are not limited to MCS110 and BLZ945. MCS110 is a monoclonal antibody (mAb) against macrophage colony-stimulating factor (M-CSF). See, e.g., Clinical Trial Identifier No. NCT00757757. BLZ945 is a small molecule inhibitor of colony stimulating factor 1 receptor (CSF1R). See, e.g., Pyonteck et al. Nat. Med. 19(2013):1264-72.

[1044] In embodiments, a CAR-expressing cell described herein is administered to a subject in combination with a CD19 CART cell (e.g., CTL019, e.g., as described in WO2012/079000, incorporated herein by reference). In embodiments, the subject has acute myeloid leukemia (AML), e.g., a CD19 positive AML or a CD19 negative AML. In embodiments, the subject has a CD19+ lymphoma, e.g., a CD19+ Non-Hodgkin's Lymphoma (NHL), a CD19+FL, or a CD19+ DLBCL. In embodiments, the subject has a relapsed or refractory CD19+ lymphoma. In embodiments, a lymphodepleting chemotherapy is administered to the subject prior to, concurrently with, or after administration (e.g., infusion) of CD19 CART cells. In an example, the lymphodepleting chemotherapy is administered to the subject prior to administration of CD19 CART cells. For example, the lymphodepleting chemotherapy ends 1-4 days (e.g,. 1, 2, 3, or 4 days) prior to CD19 CART cell infusion. In embodiments, multiple doses of CD19 CART cells are administered, e.g., as described herein. For example, a single dose comprises about 5×10⁸ CD19 CART cells. In embodiments, a lymphodepleting chemotherapy is administered to the subject prior to, concurrently with, or after administration (e.g., infusion) of a CAR-expressing cell described herein, e.g., a non-CD19 CAR-expressing cell. In embodiments, a CD19 CART is administered to the subject prior to, concurrently with, or after administration (e.g., infusion) of a non-CD19 CAR-expressing cell, e.g., a non-CD19 CAR-expressing cell described herein.

[1045] In some embodiments, a CAR-expressing cell described herein is administered to a subject in combination with a CD19 CAR-expressing cell, e.g., CTL019, e.g., as described in WO2012/079000, incorporated herein by reference, for treatment of a disease associated with the expression of CLL-1, e.g., a cancer described herein. Without being bound by theory, it is believed that administering a CD19 CAR-expressing cell in combination with a CAR-expressing cell improves the efficacy of a CAR-expressing cell described herein by targeting early lineage cancer cells, e.g., cancer stem cells, modulating the immune response, depleting regulatory B cells, and/or improving the tumor microenvironment. For example, a CD19 CAR-expressing cell targets cancer cells that express early lineage markers, e.g., cancer stem cells and CD19-expressing cells, while the CAR-expressing cell described herein targets cancer cells that express later lineage markers, e.g., CLL-1. This preconditioning approach can improve the efficacy of the CAR-expressing cell described herein. In such embodiments, the CD19 CAR-expressing cell is administered prior to, concurrently with, or after administration (e.g., infusion) of a CAR-expressing cell described herein.

[1046] In embodiments, a CAR-expressing cell described herein also expresses a CAR targeting CD19, e.g., a CD19 CAR. In an embodiment, the cell expressing a CAR described herein and a CD19 CAR is administered to a subject for treatment of a cancer described herein, e.g., AML. In an embodiment, the configurations of one or both of the CAR molecules comprise a primary intracellular signaling domain and a costimulatory signaling domain. In another embodiment, the configurations of one or both of the CAR molecules comprise a primary intracellular signaling domain and two or more, e.g., 2, 3, 4, or 5 or more, costimulatory signaling domains. In such embodiments, the CAR molecule described herein and the CD19 CAR may have the same or a different primary intracellular signaling domain, the same or different costimulatory signaling domains, or the same number or a different number of costimulatory signaling domains. Alternatively, the CAR described herein and the CD19 CAR are configured as a split CAR, in which one of the CAR molecules comprises an antigen binding domain and a costimulatory domain (e.g., 4-1BB), while the other CAR molecule comprises an antigen binding domain and a primary intracellular signaling domain (e.g., CD3 zeta).

[1047] In some embodiments, a CAR-expressing cell described herein is administered to a subject in combination with a interleukin-15 (IL-15) polypeptide, a interleukin-15 receptor alpha (IL-15Ra) polypeptide, or a combination of both a IL-15 polypeptide and a IL-15Ra polypeptide e.g., hetIL-15 (Admune Therapeutics, LLC). hetIL-15 is a heterodimeric non-covalent complex of IL-15 and IL-15Ra. hetIL-15 is described in, e.g., U.S. Pat. No. 8,124,084, U.S. 2012/0177598, U.S. 2009/0082299, U.S. 2012/0141413, and U.S. 2011/0081311, incorporated herein by reference. In embodiments, het-IL-15 is administered subcutaneously. In embodiments, the subject has a cancer, e.g., solid cancer, e.g., melanoma or colon cancer. In embodiments, the subject has a metastatic cancer.

[1048] In embodiments, a subject having a disease described herein, e.g., a hematological disorder, e.g., AML or MDS, is administered a CAR-expressing cell described herein in combination with an agent, e.g., cytotoxic or chemotherapy agent, a biologic therapy (e.g., antibody, e.g., monoclonal antibody, or cellular therapy), or an inhibitor (e.g., kinase inhibitor). In embodiments, the subject is administered a CAR-expressing cell described herein in combination with a cytotoxic agent, e.g., CPX-351 (Celator Pharmaceuticals), cytarabine, daunorubicin, vosaroxin (Sunesis Pharmaceuticals), sapacitabine (Cyclacel Pharmaceuticals), idarubicin, or mitoxantrone. CPX-351 is a liposomal formulation comprising cytarabine and daunorubicin at a 5:1 molar ratio. In embodiments, the subject is administered a CAR-expressing cell described herein in combination with a hypomethylating agent, e.g., a DNA methyltransferase inhibitor, e.g., azacitidine or decitabine. In embodiments, the subject is administered a CAR-expressing cell described herein in combination with a biologic therapy, e.g., an antibody or cellular therapy, e.g., 225Ac-lintuzumab (Actimab-A; Actinium Pharmaceuticals), IPH2102 (Innate Pharma/Bristol Myers Squibb), SGN-CD33A (Seattle Genetics), or gemtuzumab ozogamicin (Mylotarg; Pfizer). SGN-CD33A is an antibody-drug conjugate (ADC) comprising a pyrrolobenzodiazepine dimer that is attached to an anti-CD33 antibody. Actimab-A is an anti-CD33 antibody (lintuzumab) labeled with actinium. IPH2102 is a monoclonal antibody that targets killer immunoglobulin-like receptors (KIRs). In embodiments, the subject is administered a CAR-expressing cell described herein in combination a FLT3 inhibitor, e.g., sorafenib (Bayer), midostaurin (Novartis), quizartinib (Daiichi Sankyo), crenolanib (Arog Pharmaceuticals), PLX3397 (Daiichi Sankyo), AKN-028 (Akinion Pharmaceuticals), or ASP2215 (Astellas). In embodiments, the subject is administered a CAR-expressing cell described herein in combination with an isocitrate dehydrogenase (IDH) inhibitor, e.g., AG-221 (Celgene/Agios) or AG-120 (Agios/Celgene). In embodiments, the subject is administered a CAR-expressing cell described herein in combination with a cell cycle regulator, e.g., inhibitor of polo-like kinase 1 (Plkl), e.g., volasertib (Boehringer Ingelheim); or an inhibitor of cyclin-dependent kinase 9 (Cdk9), e.g., alvocidib (Tolero Pharmaceuticals/Sanofi Aventis). In embodiments, the subject is administered a CAR-expressing cell described herein in combination with a B cell receptor signaling network inhibitor, e.g., an inihibitor of B-cell lymphoma 2 (Bcl-2), e.g., venetoclax (Abbvie/Roche); or an inhibitor of Bruton's tyrosine kinase (Btk), e.g., ibrutinib (Pharmacyclics/Johnson & Johnson Janssen Pharmaceutical). In embodiments, the subject is administered a CAR-expressing cell described herein in combination with an inhibitor of M1 aminopeptidase, e.g., tosedostat (CTI BioPharma/Vernalis); an inhibitor of histone deacetylase (HDAC), e.g., pracinostat (MEI Pharma); a multi-kinase inhibitor, e.g., rigosertib (Onconova Therapeutics/Baxter/SymBio); or a peptidic CXCR4 inverse agonist, e.g., BL-8040 (BioLineRx).

[1049] In another embodiment, the subjects receive an infusion of the CAR expressing cell, e.g., CD19 CAR-expressing cell, compositions of the present invention prior to transplantation, e.g., allogeneic stem cell transplant, of cells. In a preferred embodiment, CAR expressing cells transiently express the CAR, e.g., by electroporation of an mRNA CAR, whereby the expression of the antigen targeted by the CAR, e.g., CD19 is terminated prior to infusion of donor stem cells to avoid engraftment failure. In one embodiment, the subject can be administered an agent which reduces or ameliorates a side effect associated with the administration of a CAR-expressing cell. Side effects associated with the administration of a CAR-expressing cell include, but are not limited to CRS, and hemophagocytic lymphohistiocytosis (HLH), also termed Macrophage Activation Syndrome (MAS). Symptoms of CRS include high fevers, nausea, transient hypotension, hypoxia, and the like. Accordingly, the methods described herein can comprise administering a CAR-expressing cell described herein to a subject and further administering an agent to manage elevated levels of a soluble factor resulting from treatment with a CAR-expressing cell. In one embodiment, the soluble factor elevated in the subject is one or more of IFN-γ, TNFα, IL-2 and IL-6. Therefore, an agent administered to treat this side effect can be an agent that neutralizes one or more of these soluble factors. Examples of such agents include, but are not limited to a steroid (e.g., corticosteroid), an inhibitor of TNFα, and an inhibitor of IL-6. An example of a TNFα inhibitor is an anti-TNFα antibody molecule such as, infliximab, adalimumab, certolizumab pegol, and golimumab. Another example of a TNFα inhibitor is a fusion protein such as entanercept. Small molecule inhibitor of TNFα include, but are not limited to, xanthine derivatives (e.g. pentoxifylline) and bupropion. An example of an IL-6 inhibitor is an anti-IL-6 antibody molecule such as tocilizumab (toc), sarilumab, elsilimomab, CNTO 328, ALD518/BMS-945429, CNTO 136, CPSI-2364, CDP6038, VX30, ARGX-109, FE301, and FM101. In one embodiment, the anti-IL-6 antibody molecule is tocilizumab. An example of an IL-1R based inhibitor is anakinra.

[1050] In embodiments, lymphodepletion is performed on a subject, e.g., prior to administering one or more cells that express a CAR described herein. In embodiments, the lymphodepletion comprises administering one or more of melphalan, cytoxan, cyclophosphamide, and fludarabine. In embodiments, the lymphodepletion comprises administering bendamustine (e.g., at about 90 mg/m², e.g., daily ×2), cyclophosphamide and fludarabine (e.g., at about 200 mg/m² cyclophosphamide and about 20 mg/m² fludarabine, e.g., daily ×3), XRT and cyclophosphamide (e.g., at about 400 cGy XRT and about 1 g/m²cyclophosphamide), cyclophosphamide (e.g., about 1 g/m² or 1.2 g/m² cyclophosphamide, e.g., over 4 days), carboplatin and gemcitabine, or modified EPOCH.

[1051] In embodiments, a lymphodepleting chemotherapy is administered to the subject prior to, concurrently with, or after administration (e.g., infusion) of CAR cells, e.g., cells described herein. In an example, the lymphodepleting chemotherapy is administered to the subject prior to administration of CAR cells. For example, the lymphodepleting chemotherapy ends 1-4 days (e.g., 1, 2, 3, or 4 days) prior to CAR cell infusion. In embodiments, multiple doses of CAR cells are administered, e.g., as described herein. For example, a single dose comprises about 5×10⁸ CAR cells. In embodiments, a lymphodepleting chemotherapy is administered to the subject prior to, concurrently with, or after administration (e.g., infusion) of a CAR-expressing cell described herein.

[1052] In some embodiments, CAR-expressing cells described herein are administered to a subject in combination with a CD19 CAR-expressing cell, e.g., CTL019, e.g., as described in WO2012/079000, incorporated herein by reference, for treatment of a disease associated with the expression of cancer antigen, e.g., a cancer described herein. Without being bound by theory, it is believed that administering a CD19 CAR-expressing cell in combination with another CAR-expressing cell improves the efficacy of a CAR-expressing cell described herein by targeting early lineage cancer cells, e.g., cancer stem cells, modulating the immune response, depleting regulatory B cells, and/or improving the tumor microenvironment. For example, a CD19 CAR-expressing cell targets cancer cells that express early lineage markers, e.g., cancer stem cells and CD19-expressing cells, while some other CAR-expressing cells described herein target cancer cells that express later lineage markers. This preconditioning approach can improve the efficacy of the CAR-expressing cell described herein. In such embodiments, the CD19 CAR-expressing cell is administered prior to, concurrently with, or after administration (e.g., infusion) of the second CAR-expressing cell.

[1053] In embodiments, a CAR-expressing cell which expresses a CAR targeting a cancer antigen other than CD19 also expresses a CAR targeting CD19, e.g., a CD19 CAR. In an embodiment, the cell expressing a non-CD19 CAR and a CD19 CAR is administered to a subject for treatment of a cancer described herein, e.g., AML. In an embodiment, the configurations of one or both of the CAR molecules comprise a primary intracellular signaling domain and a costimulatory signaling domain. In another embodiment, the configurations of one or both of the CAR molecules comprise a primary intracellular signaling domain and two or more, e.g., 2, 3, 4, or 5 or more, costimulatory signaling domains. In such embodiments, the non-CD19 CAR molecule and the CD19 CAR may have the same or a different primary intracellular signaling domain, the same or different costimulatory signaling domains, or the same number or a different number of costimulatory signaling domains. Alternatively, the non-CD19 CAR and the CD19 CAR are configured as a split CAR, in which one of the CAR molecules comprises an antigen binding domain and a costimulatory domain (e.g., 4-1BB), while the other CAR molecule comprises an antigen binding domain and a primary intracellular signaling domain (e.g., CD3 zeta).

### Inhibitory Molecule Inhibitors/Checkpoint Inhibitors

[1054] In one embodiment, the subject can be administered an agent which enhances the activity of a CAR-expressing cell. For example, in one embodiment, the agent can be an agent which inhibits an inhibitory molecule, e.g., the agent is a checkpoint inhibitor. Inhibitory or checkpoint molecules, e.g., Programmed Death 1 (PD1), can, in some embodiments, decrease the ability of a CAR-expressing cell to mount an immune effector response. Examples of inhibitory molecules include PD1, PD-L1, PD-L2, CTLA4, TIM3, CEACAM (e.g., CEACAM-1, CEACAM-3 and/or CEACAM-5), LAG3, VISTA, BTLA, TIGIT, LAIR1, CD160, 2B4, CD160, 2B4, CD80, CD86, B7-H3 (CD276), B7-H4 (VTCN1), HVEM (TNFRSF14 or CD270), KIR, A2aR, MHC class I, MHC class II, GAL9, adenosine, and TGF (e.g., TGF beta). In embodiments, the CAR-expressing cell described herein comprises a switch costimulatory receptor, e.g., as described in WO 2013/019615, which is incorporated herein by reference in its entirety.

[1055] The methods described herein can include administration of a CAR-expressing cell in combination with a checkpoint inhibitor. In one embodiment, the subject is a complete responder. In another embodiment, the subject is a partial responder or non-responder, and, e.g., in some embodiments, the checkpoint inhibitor is administered prior to the CAR-expressing cell, e.g., two weeks, 12 days, 10 days, 8 days, one week, 6 days, 5 days, 4 days, 3 days, 2 days or 1 day before administration of the CAR-expressing cell. In some embodiments, the checkpoint inhibitor is administered concurrently with the CAR-expressing cell.

[1056] Inhibition of an inhibitory molecule, e.g., by inhibition at the DNA, RNA or protein level, can optimize a CAR-expressing cell performance. In embodiments, an inhibitory nucleic acid, e.g., an inhibitory nucleic acid, e.g., a dsRNA, e.g., an siRNA or shRNA, or a clustered regularly interspaced short palindromic repeats (CRISPR), a transcription-activator like effector nuclease (TALEN), or a zinc finger endonuclease (ZFN), can be used to inhibit expression of an inhibitory molecule in the CAR-expressing cell. In an embodiment the inhibitor is an shRNA. In an embodiment, the inhibitory molecule is inhibited within a CAR-expressing cell. In these embodiments, a dsRNA molecule that inhibits expression of the inhibitory molecule is linked to the nucleic acid that encodes a component, e.g., all of the components, of the CAR.

[1057] In an embodiment, a nucleic acid molecule that encodes a dsRNA molecule that inhibits expression of the molecule that modulates or regulates, e.g., inhibits, T-cell function is operably linked to a promoter, e.g., a H1- or a U6-derived promoter such that the dsRNA molecule that inhibits expression of the molecule that modulates or regulates, e.g., inhibits, T-cell function is expressed, e.g., is expressed within a CAR-expressing cell. See e.g., Tiscornia G., “Development of Lentiviral Vectors Expressing siRNA,” Chapter 3, in Gene Transfer: Delivery and Expression of DNA and RNA (eds. Friedmann and Rossi). Cold Spring Harbor Laboratory Press, Cold Spring Harbor, NY, USA, 2007; Brummelkamp T R, et al. (2002) Science 296: 550-553; Miyagishi M, et al. (2002) Nat. Biotechnol. 19: 497-500. In an embodiment the nucleic acid molecule that encodes a dsRNA molecule that inhibits expression of the molecule that modulates or regulates, e.g., inhibits, T-cell function is present on the same vector, e.g., a lentiviral vector, that comprises a nucleic acid molecule that encodes a component, e.g., all of the components, of the CAR. In such an embodiment, the nucleic acid molecule that encodes a dsRNA molecule that inhibits expression of the molecule that modulates or regulates, e.g., inhibits, T-cell function is located on the vector, e.g., the lentiviral vector, 5′- or 3′- to the nucleic acid that encodes a component, e.g., all of the components, of the CAR. The nucleic acid molecule that encodes a dsRNA molecule that inhibits expression of the molecule that modulates or regulates, e.g., inhibits, T-cell function can be transcribed in the same or different direction as the nucleic acid that encodes a component, e.g., all of the components, of the CAR. In an embodiment the nucleic acid molecule that encodes a dsRNA molecule that inhibits expression of the molecule that modulates or regulates, e.g., inhibits, T-cell function is present on a vector other than the vector that comprises a nucleic acid molecule that encodes a component, e.g., all of the components, of the CAR. In an embodiment, the nucleic acid molecule that encodes a dsRNA molecule that inhibits expression of the molecule that modulates or regulates, e.g., inhibits, T-cell function it transiently expressed within a CAR-expressing cell. In an embodiment, the nucleic acid molecule that encodes a dsRNA molecule that inhibits expression of the molecule that modulates or regulates, e.g., inhibits, T-cell function is stably integrated into the genome of a CAR-expressing cell. In an embodiment, the molecule that modulates or regulates, e.g., inhibits, T-cell function is PD-1.

[1058] In one embodiment, the inhibitor of an inhibitory signal can be, e.g., an antibody or antibody fragment that binds to an inhibitory molecule. For example, the agent can be an antibody or antibody fragment that binds to PD1, PD-L1, PD-L2 or CTLA4 (e.g., ipilimumab (also referred to as MDX-010 and MDX-101, and marketed as Yervoy®; Bristol-Myers Squibb; Tremelimumab (IgG2 monoclonal antibody available from Pfizer, formerly known as ticilimumab, CP-675,206)). In an embodiment, the agent is an antibody or antibody fragment that binds to TIM3. In an embodiment, the agent is an antibody or antibody fragment that binds to LAG3. In an embodiment, the agent is an antibody or antibody fragment that binds to CEACAM (e.g., CEACAM-1, CEACAM-3 and/or CEACAM-5). In embodiments, the agent that enhances the activity of a CAR-expressing cell, e.g., inhibitor of an inhibitory molecule, is administered in combination with an allogeneic CAR, e.g., an allogeneic CAR described herein (e.g., described in the Allogeneic CAR section herein).

[1059] PD1 is an inhibitory member of the CD28 family of receptors that also includes CD28, CTLA-4, ICOS, and BTLA. PD1 is expressed on activated B cells, T cells and myeloid cells (Agata et al. 1996 Int. Immunol 8:765-75). Two ligands for PD1, PD-L1 and PD-L2 have been shown to downregulate T cell activation upon binding to PD1 (Freeman et a. 2000 J Exp Med 192:1027-34; Latchman et al. 2001 Nat Immunol 2:261-8; Carter et al. 2002 Eur J Immunol 32:634-43). PD-L1 is abundant in human cancers (Dong et al. 2003 J Mol Med 81:281-7; Blank et al. 2005 Cancer Immunol. Immunother 54:307-314; Konishi et al. 2004 Clin Cancer Res 10:5094). Immune suppression can be reversed by inhibiting the local interaction of PD1 with PD-L1.

[1060] Antibodies, antibody fragments, and other inhibitors of PD1, PD-L1 and PD-L2 are available in the art and may be used combination with a CD19 CAR described herein. For example, nivolumab (also referred to as BMS-936558 or MDX1106; Bristol-Myers Squibb) is a fully human IgG4 monoclonal antibody which specifically blocks PD1. Nivolumab (clone 5C4) and other human monoclonal antibodies that specifically bind to PD1 are disclosed in U.S. Pat. No. 8,008,449 and WO2006/121168. Pidilizumab (CT-011; Cure Tech) is a humanized IgG1k monoclonal antibody that binds to PD1. Pidilizumab and other humanized anti-PD1 monoclonal antibodies are disclosed in W02009/101611. Pembrolizumab (formerly known as lambrolizumab, and also referred to as Keytruda, MK03475; Merck) is a humanized IgG4 monoclonal antibody that binds to PD1. Pembrolizumab and other humanized anti-PD1 antibodies are disclosed in U.S. Pat. No. 8,354,509 and WO2009/114335. MEDI4736 (Medimmune) is a human monoclonal antibody that binds to PDL1, and inhibits interaction of the ligand with PD1. MDPL3280A (Genentech/Roche) is a human Fc optimized IgG1 monoclonal antibody that binds to PD-L1. MDPL3280A and other human monoclonal antibodies to PD-L1 are disclosed in U.S. Pat. No. 7,943,743 and U.S Publication No.: 20120039906. Other anti-PD-L1 binding agents include YW243.55.570 (heavy and light chain variable regions are shown in SEQ ID NOs 20 and 21 in WO2010/077634) and MDX-1 105 (also referred to as BMS-936559, and, e.g., anti-PD-L1 binding agents disclosed in WO2007/005874). AMP-224 (B7-DCIg; Amplimmune; e.g., disclosed in WO2010/027827 and WO2011/066342), is a PD-L2 Fc fusion soluble receptor that blocks the interaction between PD1 and B7-H1. Other anti-PD1 antibodies include AMP 514 (Amplimmune), among others, e.g., anti-PD1 antibodies disclosed in U.S. Pat. No. 8,609,089, US 2010028330, and/or US 20120114649.

[1061] In some embodiments, a PD1 inhibitor described herein (e.g., a PD1 antibody, e.g., a PD1 antibody described herein) is used combination with a CD19 CAR described herein to treat a disease associated with expression of CD19. In some embodiments, a PD-L1 inhibitor described herein (e.g., a PD-L1 antibody, e.g., a PD-L1 antibody described herein) is used combination with a CD19 CAR described herein to treat a disease associated with expression of CD19. In some embodiments, the CD19 CAR therapy is administered prior to, simultaneously with or after the PD-1 inhibitor. In one embodiment, the CD19 CAR therapy is administered prior to the PD-1 inhibitor. For example, one or more doses of the PD-1 inhibitor can be administered post-CD19 CAR therapy (e.g., starting 5 days to 4 months, e.g., 10 day to 3 months, e.g., 14 days to 2 months post-CD19 CAR therapy). In some embodiments, the combination of the CD19 CAR therapy and PD-1 inhibitor therapy is repeated.

[1062] The disease may be, e.g., a lymphoma such as DLBCL including primary DLBCL or secondary DLBCL. In some embodiments, the subject has, or is identified as having, at least 5%, 6%, 7%, 8%, 9%, 10%, 20%, 30%, 40%, 50%, 60%, 70%, 80%, or 90% of cancer cells, e.g., DLBCL cells, which are CD3+/PD1+. In some embodiments, the subject has, or is identified as having, substantially non-overlapping populations of CD19+ cells and PD-L1+ cells in a cancer, e.g., the cancer microenvironment. For instance, in some embodiments, less than 20%, 10%, 9%, 8%, 7%, 6%, 5%, 4%, 3%, 2%, or 1% of cells in the cancer, e.g., cancer microenvironment, are double positive for CD19 and PD-L1.

[1063] In embodiments of the CD19 CAR therapy-PD1 inhibitor therapy, the CD19 CAR therapy comprises one or more treatments with cells that express a murine CAR molecule described herein, e.g., a murine CD19 CAR molecule of Tables 3, 4 and 5 on pages 359-363 of International Application WO 2016/164731, filed Apr. 8, 2016, which is incorporated by reference in its entirety.

[1064] In another embodiment of the CD19 CAR therapy-PD1 inhibitor therapy, the CD19 CAR therapy comprises one or more treatments with cells that express a humanized CD19 CAR, e.g., a humanized CD19 CAR according to Tables 2, 4 and 5 on page 339-363 of International Application WO 2016/164731, filed Apr. 8, 2016, which is incorporated by reference in its entirety.

[1065] In some embodiments, the subject is treated with a combination of a CD19 CAR, a PD1 inhibitor, and a PD-L1 inhibitor. In some embodiments, the subject is treated with a combination of a CD19 CAR, a PD1 inhibitor, and a CD3 inhibitor. In some embodiments, the subject is treated with a combination of a CD19 CAR, a PD1 inhibitor, a PD-L1 inhibitor, and a CD3 inhibitor. Optionally, the subject has, or is identified as having, at least 5%, 6%, 7%, 8%, 9%, 10%, 20%, 30%, 40%, 50%, 60%, 70%, 80%, or 90% of cancer cells, e.g., DLBCL cells, which are CD3+/PD1+.

[1066] In some embodiments, the methods herein include a step of assaying cells in a biological sample, e.g., a sample comprising DLBCL cells, for CD3 and/or PD-1 (e.g., CD3 and/or PD-1 expression). In some embodiments, the methods include a step of assaying cells in a biological sample, e.g., a sample comprising DLBCL cells, for CD19 and/or PD-L1 (e.g., CD19 and/or PD-L1 expression). In some embodiments, the methods include, e.g., providing a sample comprising cancer cells and performing a detection step, e.g., by immunohistochemistry, for one or more of CD3, PD-1, CD19, or PD-L1. The methods may comprise a further step of recommending or administering a treatment, e.g., a treatment comprising a CD19 CAR.

[1067] In one embodiment, the anti-PD-1 antibody or fragment thereof is an anti-PD-1 antibody molecule as described in US 2015/0210769, entitled “Antibody Molecules to PD-1 and Uses Thereof,” incorporated by reference in its entirety. In one embodiment, the anti-PD-1 antibody molecule includes at least one, two, three, four, five or six CDRs (or collectively all of the CDRs) from a heavy and light chain variable region from an antibody chosen from any of BAPO49-hum01, BAPO49-hum02, BAPO49-hum03, BAPO49-hum04, BAPO49-hum05, BAPO49-hum06, BAPO49-hum07, BAPO49-hum08, BAPO49-hum09, BAPO49-hum10, BAPO49-hum11, BAPO49-hum12, BAPO49-hum13, BAPO49-hum14, BAPO49-hum15, BAPO49-hum16, BAPO49-Clone-A, BAPO49-Clone-B, BAPO49-Clone-C, BAPO49-Clone-D, or BAPO49-Clone-E; or as described in Table 1 of US 2015/0210769, or encoded by the nucleotide sequence in Table 1, or a sequence substantially identical (e.g., at least 80%, 85%, 90%, 92%, 95%, 97%, 98%, 99% or higher identical) to any of the aforesaid sequences; or closely related CDRs, e.g., CDRs which are identical or which have at least one amino acid alteration, but not more than two, three or four alterations (e.g., substitutions, deletions, or insertions, e.g., conservative substitutions).

[1068] In yet another embodiment, the anti-PD-1 antibody molecule comprises at least one, two, three or four variable regions from an antibody described herein, e.g., an antibody chosen from any of BAP049-hum01, BAP049-hum02, BAP049-hum03, BAP049-hum04, BAP049-hum05, BAP049-hum06, BAP049-hum07, BAP049-hum08, BAP049-hum09, BAP049-hum10, BAP049-hum11, BAP049-hum12, BAP049-hum13, BAP049-hum14, BAP049-hum15, BAP049-hum16, BAP049-Clone-A, BAP049-Clone-B, BAP049-Clone-C, BAP049-Clone-D, or BAP049-Clone-E; or as described in Table 1 of US 2015/0210769, or encoded by the nucleotide sequence in Table 1; or a sequence substantially identical (e.g., at least 80%, 85%, 90%, 92%, 95%, 97%, 98%, 99% or higher identical) to any of the aforesaid sequences.

[1069] In one embodiment of the CD19 CAR therapy-PD1 inhibitor therapy, the PD-1 inhibitor, e.g., pembrolizumab, is administered post-CD19 CAR therapy (e.g., starting 5 days to 4 months, e.g., 10 day to 3 months, e.g., 14 days to 2 months post-CTL019 or post-CTL119 therapy, or post-a combination of CTL019 and CTL119 therapies). In embodiments, administration of the therapy is to a subject with B-ALL, e.g., relapsed or refractory B-ALL.

[1070] In yet another embodiment of the CD19 CAR therapy-PD1 inhibitor therapy, the hematologic cancer is B-ALL, e.g., relapsed or refractory B-ALL.

[1071] In one embodiment, the subject has a hematologic malignancy, e.g., B-ALL, and may not respond to the CAR T therapy or may relapse, e.g., due to poor CAR T cell persistence.

[1072] In one embodiment of the CD19 CAR therapy-PD1 inhibitor therapy, the subject shows an improved therapeutic outcome, e.g., the subject achieves one or more of partial remission, complete remission, or prolonged CAR T cell persistence, in response to the CD19 CAR therapy-PD1 inhibitor therapy, e.g., one or more cycles of the CD19 CAR therapy-PD1 inhibitor therapy.

[1073] In one embodiment of the CD19 CAR therapy-PD1 inhibitor therapy, prior to administration of the PD-1 inhibitor, the subject has relapsed or refractory B-ALL to a prior treatment with a CD19 CAR therapy, e.g., a prior treatment with one or both of CTL019 and CTL119. In some embodiments, the subject shows decreased or poor CAR T cell persistence. In some embodiments, the subject shows CD19+ relapse.

[1074] In some embodiments, the subject, e.g., a subject showing CD19+ relapse after a CD19CAR therapy, is administered a further CD19 CAR therapy, in combination with the PD-1 inhibitor, e.g., pembrolizumab. In embodiments, the further administration of the combination therapy results in an improved therapeutic outcome, e.g., the subject achieves one or more of partial remission, complete remission, or a prolonged CAR T cell persistence. TIM3 (T cell immunoglobulin-3) also negatively regulates T cell function, particularly in IFN-g-secreting CD4+ T helper 1 and CD8+ T cytotoxic 1 cells, and plays a critical role in T cell exhaustion. Inhibition of the interaction between TIM3 and its ligands, e.g., galectin-9 (Gal9), phosphatidylserine (PS), and HMGB1, can increase immune response. Antibodies, antibody fragments, and other inhibitors of TIM3 and its ligands are available in the art and may be used combination with a CD19 CAR described herein. For example, antibodies, antibody fragments, small molecules, or peptide inhibitors that target TIM3 binds to the IgV domain of TIM3 to inhibit interaction with its ligands. Antibodies and peptides that inhibit TIM3 are disclosed in WO2013/006490 and US20100247521. Other anti-TIM3 antibodies include humanized versions of RMT3-23 (disclosed in Ngiow et al., 2011, Cancer Res, 71:3540-3551), and clone 8B.2C12 (disclosed in Monney et al., 2002, Nature, 415:536-541). Bi-specific antibodies that inhibit TIM3 and PD-1 are disclosed in US20130156774.

[1075] In one embodiment, the anti-TIM3 antibody or fragment thereof is an anti-TIM3 antibody molecule as described in US 2015/0218274, entitled “Antibody Molecules to TIM3 and Uses Thereof,” incorporated by reference in its entirety. In one embodiment, the anti-TIM3 antibody molecule includes at least one, two, three, four, five or six CDRs (or collectively all of the CDRs) from a heavy and light chain variable region from an antibody chosen from any of ABTIM3, ABTIM3-hum01, ABTIM3-hum02, ABTIM3-hum03, ABTIM3-hum04, ABTIM3-hum05, ABTIM3-hum06, ABTIM3-hum07, ABTIM3-hum08, ABTIM3-hum09, ABTIM3-hum10, ABTIM3-hum11, ABTIM3-hum12, ABTIM3-hum13, ABTIM3-hum14, ABTIM3-hum15, ABTIM3-hum16, ABTIM3-hum17, ABTIM3-hum18, ABTIM3-hum19, ABTIM3-hum20, ABTIM3-hum21, ABTIM3-hum22, ABTIM3-hum23; or as described in Tables 1-4 of US 2015/0218274; or encoded by the nucleotide sequence in Tables 1-4; or a sequence substantially identical (e.g., at least 80%, 85%, 90%, 92%, 95%, 97%, 98%, 99% or higher identical) to any of the aforesaid sequences, or closely related CDRs, e.g., CDRs which are identical or which have at least one amino acid alteration, but not more than two, three or four alterations (e.g., substitutions, deletions, or insertions, e.g., conservative substitutions).

[1076] In yet another embodiment, the anti-TIM3 antibody molecule comprises at least one, two, three or four variable regions from an antibody described herein, e.g., an antibody chosen from any of ABTIM3, ABTIM3-hum01, ABTIM3-hum02, ABTIM3-hum03, ABTIM3-hum04, ABTIM3-hum05, ABTIM3-hum06, ABTIM3-hum07, ABTIM3-hum08, ABTIM3-hum09, ABTIM3-hum10, ABTIM3-hum11, ABTIM3-hum12, ABTIM3-hum13, ABTIM3-hum14, ABTIM3-hum15, ABTIM3-hum16, ABTIM3-hum17, ABTIM3-hum18, ABTIM3-hum19, ABTIM3-hum20, ABTIM3-hum21, ABTIM3-hum22, ABTIM3-hum23; or as described in Tables 1-4 of US 2015/0218274; or encoded by the nucleotide sequence in Tables 1-4; or a sequence substantially identical (e.g., at least 80%, 85%, 90%, 92%, 95%, 97%, 98%, 99% or higher identical) to any of the aforesaid sequences.

[1077] In other embodiments, the agent which enhances the activity of a CAR-expressing cell is a CEACAM inhibitor (e.g., CEACAM-1, CEACAM-3, and/or CEACAM-5 inhibitor). In one embodiment, the inhibitor of CEACAM is an anti-CEACAM antibody molecule. Exemplary anti-CEACAM-1 antibodies are described in WO 2010/125571, WO 2013/082366 WO 2014/059251 and WO 2014/022332, e.g., a monoclonal antibody 34B1, 26H7, and 5F4; or a recombinant form thereof, as described in, e.g., US 2004/0047858, U.S. Pat. No. 7,132,255 and WO 99/052552. In other embodiments, the anti-CEACAM antibody binds to CEACAM-5 as described in, e.g., Zheng et al. PLoS One. 2010 Sep. 2; 5(9). pii: e12529 (DOI:10:1371/journal.pone.0021146), or crossreacts with CEACAM-1 and CEACAM-5 as described in, e.g., WO 2013/054331 and US 2014/0271618.

[1078] Without wishing to be bound by theory, carcinoembryonic antigen cell adhesion molecules (CEACAM), such as CEACAM-1 and CEACAM-5, are believed to mediate, at least in part, inhibition of an anti-tumor immune response (see e.g., Markel et al. J Immunol. 2002 Mar. 15; 168(6):2803-10; Markel et al. J Immunol. 2006 Nov. 1; 177(9):6062-71; Markel et al. Immunology. 2009 February;126(2):186-200; Markel et al. Cancer Immunol Immunother. 2010 February;59(2):215-30; Ortenberg et al. Mol Cancer Ther. 2012 June;11(6):1300-10; Stern et al. J Immunol. 2005 Jun. 1; 174(11):6692-701; Zheng et al. PLoS One. 2010 Sep. 2; 5(9). pii: e12529). For example, CEACAM-1 has been described as a heterophilic ligand for TIM-3 and as playing a role in TIM-3-mediated T cell tolerance and exhaustion (see e.g., WO 2014/022332; Huang, et al. (2014) Nature doi:10.1038/nature13848). In embodiments, co-blockade of CEACAM-1 and TIM-3 has been shown to enhance an anti-tumor immune response in xenograft colorectal cancer models (see e.g., WO 2014/022332; Huang, et al. (2014), supra). In other embodiments, co-blockade of CEACAM-1 and PD-1 reduce T cell tolerance as described, e.g., in WO 2014/059251. Thus, CEACAM inhibitors can be used with the other immunomodulators described herein (e.g., anti-PD-1 and/or anti-TIM-3 inhibitors) to enhance an immune response against a cancer, e.g., a melanoma, a lung cancer (e.g., NSCLC), a bladder cancer, a colon cancer, an ovarian cancer, and other cancers as described herein.

[1079] LAG3 (lymphocyte activation gene-3 or CD223) is a cell surface molecule expressed on activated T cells and B cells that has been shown to play a role in CD8+ T cell exhaustion. Antibodies, antibody fragments, and other inhibitors of LAG3 and its ligands are available in the art and may be used combination with a CD19 CAR described herein. For example, BMS-986016 (Bristol-Myers Squib) is a monoclonal antibody that targets LAG3. IMP701 (rnrnutep) is an antagonist LAG3 antibody and IMP731 (Immutep and GlaxoSnithKtine) is a depleting LAG3 antibody. Other LAG3 inhibitors include IMP321 (Immutep), which is a recombinant fusion protein of a soluble portion of LAG3 and Ig that binds to MHC class II molecules and activates antigen presenting cells (APC). Other antibodies are disclosed, e.g., in WO2010/019570.

[1080] In one embodiment, the anti-LAG3 antibody or fragment thereof is an anti-LAG3 antibody molecule as described in US 2015/0259420, entitled “Antibody Molecules to LAG3 and Uses Thereof,” incorporated by reference in its entirety. In one embodiment, the anti-LAG3 antibody molecule includes at least one, two, three, four, five or six CDRs (or collectively all of the CDRs) from a heavy and light chain variable region from an antibody chosen from any of BAP050-hum01, BAP050-hum02, BAP050-hum03, BAP050-hum04, BAP050-hum05, BAP050-hum06, BAP050-hum07, BAP050-hum08, BAP050-hum09, BAP050-hum10, BAP050-hum11, BAP050-hum12, BAP050-hum13, BAP050-hum14, BAP050-hum15, BAP050-hum16, BAP050-hum17, BAP050-hum18, BAP050-hum19, BAP050-hum20, huBAP050(Ser) (e.g., BAP050-hum01-Ser, BAP050-hum02-Ser, BAP050-hum03-Ser, BAP050-hum04-Ser, BAP050-hum05-Ser, BAP050-hum06-Ser, BAP050-hum07-Ser, BAP050-hum08-Ser, BAP050-hum09-Ser, BAP050-hum10-Ser, BAP050-hum11-Ser, BAP050-hum12-Ser, BAP050-hum13-Ser, BAP050-hum14-Ser, BAP050-hum15-Ser, BAP050-hum18-Ser, BAP050-hum19-Ser, or BAP050-hum20-Ser), BAP050-Clone-F, BAP050-Clone-G, BAP050-Clone-H, BAP050-Clone-I, or BAP050-Clone-J; or as described in Table 1 of US 2015/0259420; or encoded by the nucleotide sequence in Table 1; or a sequence substantially identical (e.g., at least 80%, 85%, 90%, 92%, 95%, 97%, 98%, 99% or higher identical) to any of the aforesaid sequences, or closely related CDRs, e.g., CDRs which are identical or which have at least one amino acid alteration, but not more than two, three or four alterations (e.g., substitutions, deletions, or insertions, e.g., conservative substitutions).

[1081] In yet another embodiment, the anti-LAG3 antibody molecule comprises at least one, two, three or four variable regions from an antibody described herein, e.g., an antibody chosen from any of BAP050-hum01, BAP050-hum02, BAP050-hum03, BAP050-hum04, BAP050-hum05, BAP050-hum06, BAP050-hum07, BAP050-hum08, BAP050-hum09, BAP050-hum10, BAP050-hum11, BAP050-hum12, BAP050-hum13, BAP050-hum14, BAP050-hum15, BAP050-hum16, BAP050-hum17, BAP050-hum18, BAP050-hum19, BAP050-hum20, huBAP050(Ser) (e.g., BAP050-hum01-Ser, BAP050-hum02-Ser, BAP050-hum03-Ser, BAP050-hum04-Ser, BAP050-hum05-Ser, BAP050-hum06-Ser, BAP050-hum07-Ser, BAP050-hum08-Ser, BAP050-hum09-Ser, BAP050-hum10-Ser, BAP050-hum11-Ser, BAP050-hum12-Ser, BAP050-hum13-Ser, BAP050-hum14-Ser, BAP050-hum15-Ser, BAP050-hum18-Ser, BAP050-hum19-Ser, or BAP050-hum20-Ser), BAP050-Clone-F, BAP050-Clone-G, BAP050-Clone-H, BAP050-Clone-I, or BAP050-Clone-J; or as described in Table 1 of US 2015/0259420; or encoded by the nucleotide sequence in Tables 1; or a sequence substantially identical (e.g., at least 80%, 85%, 90%, 92%, 95%, 97%, 98%, 99% or higher identical) to any of the aforesaid sequences.

[1082] In embodiments, the subject is administered an additional agent (in further combination with a CAR-expressing cell, e.g., a CD19 CAR-expressing cell), where the additional agent is an inhibitor of an inhibitory molecule, e.g., checkpoint molecule, e.g., PD-1, PD-L1, CTLA4, TIM3, CEACAM (e.g., CEACAM-1, CEACAM-3 and/or CEACAM-5), LAG3, VISTA, BTLA, TIGIT, LAIR1, CD160, 2B4, CD80, CD86, B7-H3 (CD276), B7-H4 (VTCN1), HVEM (TNFRSF14 or CD270), KIR, A2aR, MHC class I, MHC class II, GAL9, adenosine, or TGF beta. In embodiments, the additional agent is an inhibitor of PD-L1, e.g., FAZ053 (a hIgG4 humanized anti-PD-L1 monoclonal antibody), MPDL3280A, durvalumab (DEMI-4736), avelumab (MSB-0010718C), or BMS-936559. In embodiments, the additional agent is an additional inhibitor of PD-1, e.g., pembrolizumab, nivolumab, PDR001, MEDI-0680 (AMP-514), AMP-224, REGN-2810, or BGB-A317. In embodiments, the additional agent is an inhibitor of CTLA-4, e.g., ipilimumab. In embodiments, the additional agent is an inhibitor of LAG-3, e.g., LAG525 (a hIgG4 humanized anti-LAG-3 monoclonal antibody). In embodiments, the additional agent is an inhibitor of TIM-3, e.g., MBG453 (a hIgG4 humanized anti-TIM-3 monoclonal antibody). In embodiments, the additional agent is an inhibitor of the enzyme, B-Raf, e.g., dabrafenib (GSK2118436; N-{3-[5-(2-aminopyrimidin-4-yl)-2-tert-butyl-1,3-thiazol-4-yl]-2-fluorophenyl}-2,6-difluorobenzenesulfonamide). In embodiments, the additional agent is an inhibitor of MEK1 and/or MEK2, e.g., trametinib (N-(3-{3-Cyclopropyl-5-[(2-fluoro-4-iodophenyl)amino]-6,8-dimethyl-2,4,7-trioxo-3,4,6,7-tetrahydropyrido[4,3-d]pyrimidin-1(2H)-yl}phenyl)acetamide). In embodiments, the additional agent comprises dabrafenib and trametinib. In embodiments, the additional agent is an inhibitor of GITR, e.g., GWN323. In embodiments, the additional agent is an agonist of STING (Stimulator of Interferon Genes), e.g., MIW815. In embodiments, the additional agent is an IL-15 agonist, e.g., NIZ985. In embodiments, the additional agent an inhibitor of adenosine receptor, e.g., NIR178. In embodiments, the additional agent is an inhibitor of macrophage colony stimulating factor (CSF-1), e.g., MCS110. In embodiments, the additional agent is an inhibitor of cMet, e.g., INC280. In embodiments, the additional agent is an inhibitor of porcupine (PORCN), e.g., WNT974. In embodiments, the additional agent is a histone deacetylase inhibitor, e.g., panobinost. In embodiments, the additional agent is an mTOR inhibitor, e.g., everolimus. In embodiments, the additional agent is a second mitochondrial-derived activator of caspases (SMAC) mimetic and/or an inhibitor of IAP (inhibiotor of apoptosis protein) family of proteins, e.g., LCL161. In embodiments, the additional agent is an inhibitor epidermal growth factor receptor (EGFR), e.g., EGF816. In embodiments, the additional agent is an inhibitor of IL-17, e.g., CJM112. In embodiments, the additional agent is an inhibitor of IL-1beta, e.g., ILARIS.

[1083] While not wishing to be bound by theory, in some embodiments, a tumor microenvironment is not conducive to CART cells attacking cancer cells, due to direct or indirect inhibitory effects exerted by the presence of PD-L1+ expressing cells or PD1+ T cells within the tumor microenvironment. More specifically, a tumor microenvironment can comprise tumor cells (which are generally CD19+), immune effector cells (which can be CD3+ T cells and can be PD1+ or PD1−, and which can be endogenous cells or CAR-expressing cells), and activated myeloid cells (which are generally PD-L1+). PD1+ T cells can create a “barrier” around the tumor microenvironment by preventing entry of CART cells the tumor. According to the non-limiting theory herein, pre-administration of a PD1 inhibitor and/or PD-L1 inhibitor makes the tumor microenvironment more favorable to entry of CAR-expressing cells into the tumor microenvironment and effectively clear the target positive cancer cells.

[1084] Accordingly, in certain aspects, the present disclosure provides methods of combination therapy comprising administering to a subject a cell that expresses a CAR molecule that binds CD19, e.g., a CD19 CAR, in combination with a PD1 inhibitor, a PD-L1 inhibitor, or both. In some embodiments, the PD1 inhibitor and/or PD-L1 inhibitor is administered before the CAR therapy. In other embodiments, the PD1 inhibitor and/or PD-L1 inhibitor is administered concurrently with or after the CAR therapy. In some aspects, the subject is a subject having a disease associated with expression of CD19, e.g., a hematologic malignancy, e.g., a leukemia or lymphoma, e.g., DLBCL, e.g. primary DLBCL. In some embodiments, the patient has, or is identified as having, elevated levels of PD1, PDL1, or CD3, or any combination thereof. In some embodiments, the patient has, or is identified as having, or at least 5%, 6%, 7%, 8%, 9%, 10%, 20%, 30%, 40%, 50%, 60%, 70%, 80%, or 90% of DLBCL cells which are positive for CD3 and PD1.

[1085] Also provided herein are methods for monitoring the efficacy of a CAR therapy, e.g., a CD19 CAR therapy. CAR-expressing cells can be administered to a patient's bloodstream with the intent that the cells home to a tumor cell, e.g., infiltrate a tumor. Accordingly, in some embodiments, the method comprises assaying a tumor sample for the presence of CAR-expressing cells. In embodiments, the method comprises detecting a tumor marker, e.g., CD19. In embodiments, the method comprises detecting a marker of a CAR-expressing cell, e.g., a CAR construct or nucleic acid encoding the CAR construct. In embodiments, the method further comprises detecting a T cell marker, e.g., CD3. In some aspects, the subject is a subject having a disease associated with expression of CD19, e.g., a hematologic malignancy, e.g., a leukemia or lymphoma, e.g., DLBCL, e.g. primary DLBCL. In some embodiments, if the CAR-expressing cells show poor infiltration of the tumor, the subject is identified as at an elevated risk of relapse compared to a subject with good infiltration of the tumor. In some embodiments, if the CAR-expressing cells show poor infiltration of the tumor, the subject is administered a PD1 inhibitor and/or PD-L1 inhibitor, e.g., in combination with a second dose of CAR-expressing cells.

[1086] In some embodiments, the agent which enhances the activity of a CAR-expressing cell can be, e.g., a fusion protein comprising a first domain and a second domain, wherein the first domain is an inhibitory molecule, or fragment thereof, and the second domain is a polypeptide that is associated with a positive signal, e.g., a polypeptide comprising an intracellular signaling domain as described herein. In some embodiments, the polypeptide that is associated with a positive signal can include a costimulatory domain of CD28, CD27, ICOS, e.g., an intracellular signaling domain of CD28, CD27 and/or ICOS, and/or a primary signaling domain, e.g., of CD3 zeta, e.g., described herein. In one embodiment, the fusion protein is expressed by the same cell that expressed the CAR. In another embodiment, the fusion protein is expressed by a cell, e.g., a T cell that does not express an anti-CD19 CAR.

[1087] In an embodiment, the method further comprises administering a checkpoint inhibitor. In embodiments, the subject receives a pre-treatment of with an agent, e.g., an mTOR inhibitor, and/or a checkpoint inhibitor, prior to the initiation of a CART therapy. In embodiments, the subject receives concurrent treatment with an agent, e.g., an mTOR inhibitor, and/or a checkpoint inhibitor. In embodiments, the subject receives treatment with an agent, e.g., an mTOR inhibitor, and/or a checkpoint inhibitor, post-CART therapy.

[1088] In embodiments, the determined level or determined characteristic is acquired before, at the same time, or during a course of CART therapy.

[1089] In one embodiment, the agent which enhances activity of a CAR-expressing cell described herein is miR-17-92.

[1090] In one embodiment, the agent which enhances activity of a CAR-described herein is a cytokine. Cytokines have important functions related to T cell expansion, differentiation, survival, and homeostasis. Cytokines that can be administered to the subject receiving a CAR-expressing cell described herein include: IL-2, IL-4, IL-7, IL-9, IL-15, IL-18, and IL-21, or a combination thereof. In embodiments, the cytokine administered is IL-7, IL-15, or IL-21, or a combination thereof. The cytokine can be administered once a day or more than once a day, e.g., twice a day, three times a day, or four times a day. The cytokine can be administered for more than one day, e.g. the cytokine is administered for 2 days, 3 days, 4 days, 5 days, 6 days, 1 week, 2 weeks, 3 weeks, or 4 weeks. For example, the cytokine is administered once a day for 7 days.

[1091] In embodiments, the cytokine is administered in combination with CAR-expressing cells. The cytokine can be administered simultaneously or concurrently with the CAR-expressing cells, e.g., administered on the same day. The cytokine may be prepared in the same pharmaceutical composition as the CAR-expressing cells, or may be prepared in a separate pharmaceutical composition. Alternatively, the cytokine can be administered shortly after administration of the CAR-expressing T cells, e.g., 1 day, 2 days, 3 days, 4 days, 5 days, 6 days, or 7 days after administration of the CAR-expressing cells. In embodiments where the cytokine is administered in a dosing regimen that occurs over more than one day, the first day of the cytokine dosing regimen can be on the same day as administration with the CAR-expressing cells, or the first day of the cytokine dosing regimen can be 1 day, 2 days, 3 days, 4 days, 5 days, 6 days, or 7 days after administration of the CAR-expressing T cells. In one embodiment, on the first day, the CAR-expressing cells are administered to the subject, and on the second day, a cytokine is administered once a day for the next 7 days. In an embodiment, the cytokine to be administered in combination with the CAR-expressing cells is IL-7, IL-15, and/or IL-21.

[1092] In other embodiments, the cytokine is administered a sufficient period of time after administration of the CAR-expressing cells, e.g., at least 2 weeks, 3 weeks, 4 weeks, 6 weeks, 8 weeks, 10 weeks, 12 weeks, 4 months, 5 months, 6 months, 7 months, 8 months, 9 months, 10 months, 11 months, or 1 year or more after administration of CAR-expressing cells. In one embodiment, the cytokine is administered after assessment of the subject's response to the CAR-expressing cells. For example, the subject is administered CAR-expressing cells according to the dosage and regimens described herein. The response of the subject to CART therapy is assessed at 2 weeks, 3 weeks, 4 weeks, 6 weeks, 8 weeks, 10 weeks, 12 weeks, 4 months, 5 months, 6 months, 7 months, 8 months, 9 months, 10 months, 11 months, or 1 year or more after administration of CAR-expressing cells, using any of the methods described herein, including inhibition of tumor growth, reduction of circulating tumor cells, or tumor regression. Subjects that do not exhibit a sufficient response to CART therapy can be administered a cytokine. Administration of the cytokine to the subject that has sub-optimal response to the CART therapy improves CART efficacy and/or anti-tumor activity. In an embodiment, the cytokine administered after administration of CAR-expressing cells is IL-7.

[1093] Further combination therapies may include anti-allergenic agents, anti-emetics, analgesics, adjunct therapies,

[1094] Some patients may experience allergic reactions to the therapeutics described herein and/or other anti-cancer agent(s) during or after administration; therefore, anti-allergic agents are often administered to minimize the risk of an allergic reaction. Suitable anti-allergic agents include corticosteroids, such as dexamethasone (e.g., Decadron®), beclomethasone (e.g., Beclovent®), hydrocortisone (also known as cortisone, hydrocortisone sodium succinate, hydrocortisone sodium phosphate, and sold under the tradenames Ala-Cort®, hydrocortisone phosphate, Solu-Cortef®, Hydrocort Acetate@ and Lanacort®), prednisolone (sold under the tradenames Delta-Cortel®, Orapred®, Pediapred® and Prelone®), prednisone (sold under the tradenames Deltasone®, Liquid Red@, Meticorten® and Orasone®), methylprednisolone (also known as 6-methylprednisolone, methylprednisolone acetate, methylprednisolone sodium succinate, sold under the tradenames Duralone®, Medralone®, Medrol®, M-Prednisol® and Solu-Medrol@); antihistamines, such as diphenhydramine (e.g., Benadryl®), hydroxyzine, and cyproheptadine; and bronchodilators, such as the beta-adrenergic receptor agonists, albuterol (e.g., Proventil®), and terbutaline (Brethine®).

[1095] Some patients may experience nausea during and after administration of the therapeutics described herein and/or other anti-cancer agent(s); therefore, anti-emetics are used in preventing nausea (upper stomach) and vomiting. Suitable anti-emetics include aprepitant (Emend@), ondansetron (Zofran®), granisetron HCl (Kytril®), lorazepam (Ativan®. dexamethasone (Decadron®), prochlorperazine (Compazine®), casopitant (Rezonic® and Zunrisa®), and combinations thereof.

[1096] Medication to alleviate the pain experienced during the treatment period is often prescribed to make the patient more comfortable. Common over-the-counter analgesics, such Tylenol@, are often used. However, opioid analgesic drugs such as hydrocodone/paracetamol or hydrocodone/acetaminophen (e.g., Vicodin®), morphine (e.g., Astramorph® or Avinza®), oxycodone (e.g., OxyContin® or Percocet®), oxymorphone hydrochloride (Opana@), and fentanyl (e.g., Duragesic®) are also useful for moderate or severe pain.

[1097] In an effort to protect normal cells from treatment toxicity and to limit organ toxicities, cytoprotective agents (such as neuroprotectants, free-radical scavengers, cardioprotectors, anthracycline extravasation neutralizers, nutrients and the like) may be used as an adjunct therapy. Suitable cytoprotective agents include Amifostine (Ethyol®), glutamine, dimesna (Tavocept®), mesna (Mesnex®), dexrazoxane (Zinecard® or Totect®), xaliproden (Xaprila®), and leucovorin (also known as calcium leucovorin, citrovorum factor and folinic acid).

[1098] The structure of the active compounds identified by code numbers, generic or trade names may be taken from the actual edition of the standard compendium “The Merck Index” or from databases, e.g. Patents International (e.g. IMS World Publications).

[1099] The above-mentioned compounds, which can be used in combination with a compound of the present invention, can be prepared and administered as described in the art, such as in the documents cited above.

[1100] In one embodiment, the present invention provides pharmaceutical compositions comprising at least one compound of the present invention (e.g., a compound of the present invention) or a pharmaceutically acceptable salt thereof together with a pharmaceutically acceptable carrier suitable for administration to a human or animal subject, either alone or together with other anti-cancer agents.

[1101] In one embodiment, the present invention provides methods of treating human or animal subjects suffering from a cellular proliferative disease, such as cancer. The present invention provides methods of treating a human or animal subject in need of such treatment, comprising administering to the subject a therapeutically effective amount of a compound of the present invention (e.g., a compound of the present invention) or a pharmaceutically acceptable salt thereof, either alone or in combination with other anti-cancer agents.

[1102] In particular, compositions will either be formulated together as a combination therapeutic or administered separately.

[1103] In combination therapy, the compound of the present invention and other anti-cancer agent(s) may be administered either simultaneously, concurrently or sequentially with no specific time limits, wherein such administration provides therapeutically effective levels of the two compounds in the body of the patient.

[1104] In a preferred embodiment, the compound of the present invention and the other anti-cancer agent(s) is generally administered sequentially in any order by infusion or orally. The dosing regimen may vary depending upon the stage of the disease, physical fitness of the patient, safety profiles of the individual drugs, and tolerance of the individual drugs, as well as other criteria well-known to the attending physician and medical practitioner(s) administering the combination. The compound of the present invention and other anti-cancer agent(s) may be administered within minutes of each other, hours, days, or even weeks apart depending upon the particular cycle being used for treatment. In addition, the cycle could include administration of one drug more often than the other during the treatment cycle and at different doses per administration of the drug.

[1105] In another aspect of the present invention, kits that include one or more compound of the present invention and a combination partner as disclosed herein are provided. Representative kits include (a) a compound of the present invention or a pharmaceutically acceptable salt thereof, (b) at least one combination partner, e.g., as indicated above, whereby such kit may comprise a package insert or other labeling including directions for administration.

[1106] A compound of the present invention may also be used to advantage in combination with known therapeutic processes, for example, the administration of hormones or especially radiation. A compound of the present invention may in particular be used as a radiosensitizer, especially for the treatment of tumors which exhibit poor sensitivity to radiotherapy.

Combination with a Low, Immune-Enhancing Dose of an mTOR Inhibitor

[1107] In one embodiment, the cells expressing a CAR molecule, e.g., a CAR molecule described herein, are administered in combination with a low, immune enhancing dose of an mTOR inhibitor. For instance, in an embodiment, the combination therapy includes: CD19 CAR expressing cells, a B-cell inhibitor (inhibitor of one or more of CD10, CD20, CD22, CD34, CD123, FLT-3, or ROR1, e.g., a CAR-expressing cell targeting one or more of CD10, CD20, CD22, CD34, CD123, FLT-3, or ROR1), and an mTOR inhibitor. Methods described herein use low, immune enhancing, doses of mTOR inhibitors, e.g., allosteric mTOR inhibitors, including rapalogs such as RAD00L. Administration of a low, immune enhancing, dose of an mTOR inhibitor (e.g., a dose that is insufficient to completely suppress the immune system, but sufficient to improve immune function) can optimize the performance of immune effector cells, e.g., T cells or CAR-expressing cells, in the subject. While not wishing to be bound by theory, it is believed that treatment with a low, immune enhancing, dose (e.g., a dose that is insufficient to completely suppress the immune system but sufficient to improve immune function) is accompanied by a decrease in PD-1 positive T cells or an increase in PD-1 negative cells. PD-1 positive T cells, but not PD-1 negative T cells, can be exhausted by engagement with cells which express a PD-1 ligand, e.g., PD-L1 or PD-L2. Additional methods of administering low, immune enhancing dose of an mTOR inhibitor and effects on T cells, e.g., T cells to be endingeered to express a CAR, are described on pages 62-63, 69, 112, and 313-315 of International Application WO 2016/164731, filed Apr. 8, 2016, which is incorporated by reference in its entirety.

[1108] Methods for measuring mTOR inhibition, dosages, treatment regimens, and suitable pharmaceutical compositions are described in U.S. Patent Application No. 2015/01240036, hereby incorporated by reference.

[1109] In an embodiment, administration of a low, immune enhancing, dose of an mTOR inhibitor can result in one or more of the following:
[1110] i) a decrease in the number of PD-1 positive immune effector cells;
[1111] ii) an increase in the number of PD-1 negative immune effector cells;
[1112] iii) an increase in the ratio of PD-1 negative immune effector cells/PD-1 positive immune effector cells;
[1113] iv) an increase in the number of naïve T cells;
[1114] v) an increase in the expression of one or more of the following markers: CD62L^{high} CD127^{high}, CD27+, and BCL2, e.g., on memory T cells, e.g., memory T cell precursors;
[1115] vi) a decrease in the expression of KLRG1, e.g., on memory T cells, e.g., memory T cell precursors; or
[1116] vii) an increase in the number of memory T cell precursors, e.g., cells with any one or combination of the following characteristics: increased CD62L^{high} increased CD127^{high} increased CD27+, decreased KLRG1, and increased BCL2;
[1117] and wherein any of the foregoing, e.g., i), ii), iii), iv), v), vi), or vii), occurs e.g., at least transiently, e.g., as compared to a non-treated subject.

[1118] In another embodiment, administration of a low, immune enhancing, dose of an mTOR inhibitor results in increased or prolonged proliferation or persistence of CAR-expressing cells, e.g., in culture or in a subject, e.g., as compared to non-treated CAR-expressing cells or a non-treated subject. In embodiments, increased proliferation or persistence is associated with in an increase in the number of CAR-expressing cells. The effect of a low dose of RAD001 on CAR T cell proliferation is described, e.g., in Example 18 on pages 557-558 of of International Application WO 2016/164731, filed Apr. 8, 2016, which is incorporated by reference in its entirety, and the effect of low dose RAD001 on CAR T cell expansion in vivo is described, e.g., in Example 19 on pages 558-560 of of International Application WO 2016/164731, filed Apr. 8, 2016, which is incorporated by reference in its entirety.

[1119] In another embodiment, administration of a low, immune enhancing, dose of an mTOR inhibitor results in increased killing of cancer cells by CAR-expressing cells, e.g., in culture or in a subject, e.g., as compared to non-treated CAR-expressing cells or a non-treated subject. In embodiments, increased killing of cancer cells is associated with in a decrease in tumor volume.

[1120] In one embodiment, the cells expressing a CAR molecule, e.g., a CAR molecule described herein, are administered in combination with a low, immune enhancing dose of an mTOR inhibitor, e.g., an allosteric mTOR inhibitor, e.g., RAD001, or a catalytic mTOR inhibitor. For example, administration of the low, immune enhancing, dose of the mTOR inhibitor can be initiated prior to administration of a CAR-expressing cell described herein; completed prior to administration of a CAR-expressing cell described herein; initiated at the same time as administration of a CAR-expressing cell described herein; overlapping with administration of a CAR-expressing cell described herein; or continuing after administration of a CAR-expressing cell described herein.

[1121] Alternatively or in addition, administration of a low, immune enhancing, dose of an mTOR inhibitor can optimize immune effector cells to be engineered to express a CAR molecule described herein. In such embodiments, administration of a low, immune enhancing, dose of an mTOR inhibitor, e.g., an allosteric inhibitor, e.g., RAD001, or a catalytic inhibitor, is initiated or completed prior to harvest of immune effector cells, e.g., T cells or NK cells, to be engineered to express a CAR molecule described herein, from a subject.

[1122] In another embodiment, immune effector cells, e.g., T cells or NK cells, to be engineered to express a CAR molecule described herein, e.g., after harvest from a subject, or CAR-expressing immune effector cells, e.g., T cells or NK cells, e.g., prior to administration to a subject, can be cultured in the presence of a low, immune enhancing, dose of an mTOR inhibitor.

[1123] In an embodiment, administering to the subject a low, immune enhancing, dose of an mTOR inhibitor comprises administering, e.g., once per week, e.g., in an immediate release dosage form, 0.1 to 20, 0.5 to 10, 2.5 to 7.5, 3 to 6, or about 5, mgs of RAD001, or a bioequivalent dose thereof. In an embodiment, administering to the subject a low, immune enhancing, dose of an mTOR inhibitor comprises administering, e.g., once per week, e.g., in a sustained release dosage form, 0.3 to 60, 1.5 to 30, 7.5 to 22.5, 9 to 18, or about 15 mgs of RAD001, or a bioequivalent dose thereof.

[1124] In an embodiment, a dose of an mTOR inhibitor is associated with, or provides, mTOR inhibition of at least 5 but no more than 90%, at least 10 but no more than 90%, at least 15, but no more than 90%, at least 20 but no more than 90%, at least 30 but no more than 90%, at least 40 but no more than 90%, at least 50 but no more than 90%, at least 60 but no more than 90%, at least 70 but no more than 90%, at least 5 but no more than 80%, at least 10 but no more than 80%, at least 15, but no more than 80%, at least 20 but no more than 80%, at least 30 but no more than 80%, at least 40 but no more than 80%, at least 50 but no more than 80%, at least 60 but no more than 80%, at least 5 but no more than 70%, at least 10 but no more than 70%, at least 15, but no more than 70%, at least 20 but no more than 70%, at least 30 but no more than 70%, at least 40 but no more than 70%, at least 50 but no more than 70%, at least 5 but no more than 60%, at least 10 but no more than 60%, at least 15, but no more than 60%, at least 20 but no more than 60%, at least 30 but no more than 60%, at least 40 but no more than 60%, at least 5 but no more than 50%, at least 10 but no more than 50%, at least 15, but no more than 50%, at least 20 but no more than 50%, at least 30 but no more than 50%, at least 40 but no more than 50%, at least 5 but no more than 40%, at least 10 but no more than 40%, at least 15, but no more than 40%, at least 20 but no more than 40%, at least 30 but no more than 40%, at least 35 but no more than 40%, at least 5 but no more than 30%, at least 10 but no more than 30%, at least 15, but no more than 30%, at least 20 but no more than 30%, or at least 25 but no more than 30%.

[1125] The extent of mTOR inhibition can be conveyed as, or corresponds to, the extent of P70 S6 kinase inhibition, e.g., the extent of mTOR inhibition can be determined by the level of decrease in P70 S6 kinase activity, e.g., by the decrease in phosphorylation of a P70 S6 kinase substrate. The level of mTOR inhibition can be evaluated by various methods, such as measuring P70 S6 kinase activity by the Boulay assay, as described in U.S. Patent Application No. 2015/01240036, hereby incorporated by reference, or as described in U.S. Pat. No. 7,727,950, hereby incorporated by reference; measuring the level of phosphorylated S6 by western blot; or evaluating a change in the ratio of PD1 negative immune effector cells to PD1 positive immune effector cells.

[1126] As used herein, the term “mTOR inhibitor” refers to a compound or ligand, or a pharmaceutically acceptable salt thereof, which inhibits the mTOR kinase in a cell. In an embodiment, an mTOR inhibitor is an allosteric inhibitor. Allosteric mTOR inhibitors include the neutral tricyclic compound rapamycin (sirolimus), rapamycin-related compounds, that is compounds having structural and functional similarity to rapamycin including, e.g., rapamycin derivatives, rapamycin analogs (also referred to as rapalogs) and other macrolide compounds that inhibit mTOR activity. In an embodiment, an mTOR inhibitor is a catalytic inhibitor.

[1127] Rapamycin is a known macrolide antibiotic produced by Streptomyces hygroscopicus.See, e.g., McAlpine, J. B., et al., J. Antibiotics (1991) 44: 688; Schreiber, S. L., et al., J. Am. Chem. Soc. (1991) 113: 7433; U.S. Pat. No. 3,929,992. There are various numbering schemes proposed for rapamycin. To avoid confusion, when specific rapamycin analogs are named herein, the names are given with reference to rapamycin using the numbering scheme of formula A.

[1128] Rapamycin analogs useful in the invention are, for example, 0-substituted analogs in which the hydroxyl group on the cyclohexyl ring of rapamycin is replaced by OR₁ in which R₁ is hydroxyalkyl, hydroxyalkoxyalkyl, acylaminoalkyl, or aminoalkyl; e.g. RAD001, also known as everolimus, as described in U.S. Pat. No. 5,665,772 and WO94/09010, the contents of each are incorporated by reference.

[1129] Other suitable rapamycin analogs include those substituted at the 26- or 28-position. The rapamycin analog may be an epimer of an analog mentioned above, particularly an epimer of an analog substituted in position 40, 28 or 26, and may optionally be further hydrogenated, e.g. as described in U.S. Pat. No. 6,015,815, WO95/14023 and WO99/15530 the contents of which are incorporated by reference, e.g. ABT578 also known as zotarolimus or a rapamycin analog described in U.S. Pat. No. 7,091,213, WO98/02441 and WO01/14387 the contents of which are incorporated by reference, e.g. AP23573 also known as ridaforolimus.

[1130] Examples of rapamycin analogs suitable for use in the present invention from U.S. Pat. No. 5,665,772 include, but are not limited to, 40-O-benzyl-rapamycin, 40-O-(4′-hydroxymethyl)benzyl-rapamycin, 40-O-[4′-(1,2-dihydroxyethyl)]benzyl-rapamycin, 40-O-allyl-rapamycin, 40-O-[3′-(2,2-dimethyl-1,3-dioxolan-4(S)-yl)-prop-2′-en-1′-yl]-rapamycin, (2′E,4'S)-40-O-(4′, 5′-dihydroxypent-2′-en-1′-yl)-rapamycin, 40-O-(2-hydroxy)ethoxycarbonylmethyl-rapamycin, 40-O-(2-hydroxy)ethyl-rapamycin, 40-O-(3-hydroxy)propyl-rapamycin, 40-O-(6-hydroxy)hexyl-rapamycin, 40-O-[2-(2-hydroxy)ethoxy]ethyl-rapamycin, 40-O-[(3S)-2,2-dimethyldioxolan-3-yl]methyl-rapamycin, 40-O-[(2S)-2,3-dihydroxyprop-1-yl]-rapamycin, 40-O-(2-acetoxy)ethyl-rapamycin, 40-O-(2-nicotinoyloxy)ethyl-rapamycin, 40-O-[2-(N-morpholino)acetoxy]ethyl-rapamycin, 40-O-(2-N-imidazolylacetoxy)ethyl-rapamycin, 40-O-[2-(N-methyl-N′-piperazinyl)acetoxy]ethyl-rapamycin, 39-O-desmethyl-39,40-O,O-ethylene-rapamycin, (26R)-26-dihydro-40-O-(2-hydroxy)ethyl-rapamycin, 40-O-(2-aminoethyl)-rapamycin, 40-O-(2-acetaminoethyl)-rapamycin, 40-O-(2-nicotinamidoethyl)-rapamycin, 40-O-(2-(N-methyl-imidazo-2′-ylcarbethoxamido)ethyl)-rapamycin, 40-O-(2-ethoxycarbonylaminoethyl)-rapamycin, 40-O-(2-tolylsulfonamidoethyl)-rapamycin and 40-O-[2-(4′, 5′-dicarboethoxy-1′, 2′, 3′-triazol-1′-yl)-ethyl]-rapamycin.

[1131] Other rapamycin analogs useful in the present invention are analogs where the hydroxyl group on the cyclohexyl ring of rapamycin and/or the hydroxy group at the 28 position is replaced with an hydroxyester group are known, for example, rapamycin analogs found in U.S. RE44,768, e.g. temsirolimus.

[1132] Other rapamycin analogs useful in the preset invention include those wherein the methoxy group at the 16 position is replaced with another substituent, e.g., (optionally hydroxy-substituted) alkynyloxy, benzyl, orthomethoxybenzyl or chlorobenzyl and/or wherein the mexthoxy group at the 39 position is deleted together with the 39 carbon so that the cyclohexyl ring of rapamycin becomes a cyclopentyl ring lacking the 39 position methyoxy group; e.g. as described in WO95/16691 and WO96/41807, the contents of which are incorporated by reference. The analogs can be further modified such that the hydroxy at the 40-position of rapamycin is alkylated and/or the 32-carbonyl is reduced.

[1133] Rapamycin analogs from WO95/16691 include, but are not limited to, 16-demthoxy-16-(pent-2-ynyl)oxy-rapamycin, 16-demthoxy-16-(but-2-ynyl)oxy-rapamycin, 16-demthoxy-16-(propargyl)oxy-rapamycin, 16-demethoxy-16-(4-hydroxy-but-2-ynyl)oxy-rapamycin, 16-demthoxy-16-benzyloxy-40-O-(2-hydroxyethyl)-rapamycin, 16-demthoxy-16-benzyloxy-rapamycin, 16-demethoxy-16-ortho-methoxybenzyl-rapamycin, 16-demethoxy-40-O-(2-methoxyethyl)-16-pent-2-ynyl)oxy-rapamycin, 39-demethoxy-40-desoxy-39-formyl-42-nor-rapamycin, 39-demethoxy-40-desoxy-39-hydroxymethyl-42-nor-rapamycin, 39-demethoxy-40-desoxy-39-carboxy-42-nor-rapamycin, 39-demethoxy-40-desoxy-39-(4-methyl-piperazin-1-yl)carbonyl-42-nor-rapamycin, 39-demethoxy-40-desoxy-39-(morpholin-4-yl)carbonyl-42-nor-rapamycin, 39-demethoxy-40-desoxy-39-[N-methyl, N-(2-pyridin-2-yl-ethyl)]carbamoyl-42-nor-rapamycin and 39-demethoxy-40-desoxy-39-(p-toluenesulfonylhydrazonomethyl)-42-nor-rapamycin.

[1134] Rapamycin analogs from WO96/41807 include, but are not limited to, 32-deoxo-rapamycin, 16-O-pent-2-ynyl-32-deoxo-rapamycin, 16-O-pent-2-ynyl-32-deoxo-40-O-(2-hydroxy-ethyl)-rapamycin, 16-O-pent-2-ynyl-32-(S)-dihydro-40-O-(2-hydroxyethyl)-rapamycin, 32(S)-dihydro-40-O-(2-methoxy)ethyl-rapamycin and 32(S)-dihydro-40-O-(2-hydroxyethyl)-rapamycin.

[1135] Another suitable rapamycin analog is umirolimus as described in US2005/0101624 the contents of which are incorporated by reference.

[1136] RAD001, otherwise known as everolimus (Afinitor®), has the chemical name (1R,9S,12S,15R,16E,18R,19R,21R,23S,24E,26E,28E,30S,32S,35R)-1,18-dihydroxy-12-{(1R)-2-[(1S,3R,4R)-4-(2-hydroxyethoxy)-3-methoxycyclohexyl]-1-methylethyl}-19,30-dimethoxy-15,17,21,23,29,35-hexamethyl-11,36-dioxa-4-aza-tricyclo [30.3.1.04,9]hexatriaconta-16,24,26,28-tetraene-2,3,10,14,20-pentaone, as described in U.S. Pat. No. 5,665,772 and WO94/09010, the contents of each are incorporated by reference.

[1137] Further examples of allosteric mTOR inhibitors include sirolimus (rapamycin, AY-22989), 40-[3-hydroxy-2-(hydroxymethyl)-2-methylpropanoate]-rapamycin (also called temsirolimus or CCI-779) and ridaforolimus (AP-23573/MK-8669). Other examples of allosteric mTor inhibitors include zotarolimus (ABT578) and umirolimus.

[1138] Alternatively or additionally, catalytic, ATP-competitive mTOR inhibitors have been found to target the mTOR kinase domain directly and target both mTORC1 and mTORC2. These are also more effective inhibitors of mTORC1 than such allosteric mTOR inhibitors as rapamycin, because they modulate rapamycin-resistant mTORC1 outputs such as 4EBP1-T37/46 phosphorylation and cap-dependent translation.

[1139] Catalytic inhibitors include: BEZ235 or 2-methyl-2-[4-(3-methyl-2-oxo-8-quinolin-3-yl-2,3-dihydro-imidazo[4,5-c]quinolin-1-yl)-phenyl]-propionitrile, or the monotosylate salt form (the synthesis of BEZ235 is described in WO2006/122806); CCG168 (otherwise known as AZD-8055, Chresta, C. M., et al., Cancer Res, 2010, 70(1), 288-298) which has the chemical name {5-[2,4-bis-((S)-3-methyl-morpholin-4-yl)-pyrido[2,3d]pyrimidin-7-yl]-2-methoxy-phenyl}-methanol; 3-[2,4-bis[(3S)-3-methylmorpholin-4-yl]pyrido[2,3-d]pyrimidin-7-yl]-N-methylbenzamide (WO09104019); 3-(2-aminobenzo[d]oxazol-5-yl)-1-isopropyl-1H-pyrazolo[3,4-d]pyrimidin-4-amine (WO10051043 and WO2013023184); A N-(3-(N-(3-((3,5-dimethoxyphenyl)amino)quinoxaline-2-yl)sulfamoyl)phenyl)-3-methoxy-4-methylbenzamide (WO07044729 and WO12006552); PKI-587 (Venkatesan, A. M., J. Med.Chem., 2010, 53, 2636-2645) which has the chemical name 1-[4-[4-(dimethylamino)piperidine-1-carbonyl]phenyl]-3-[4-(4,6-dimorpholino-1,3,5-triazin-2-yl)phenyl]urea; GSK-2126458 (ACS Med. Chem. Lett., 2010, 1, 39-43) which has the chemical name 2,4-difluoro-N-{2-methoxy-5-[4-(4-pyridazinyl)-6-quinolinyl]-3-pyridinyl}benzenesulfonamide; 5-(9-isopropyl-8-methyl-2-morpholino-9H-purin-6-yl)pyrimidin-2-amine (WO10114484); and (E)-N-(8-(6-amino-5-(trifluoromethyl)pyridin-3-yl)-1-(6-(2-cyanopropan-2-yl)pyridin-3-yl)-3-methyl-1H-imidazo[4,5-c]quinolin-2(3H)-ylidene)cyanamide (WO12007926).

[1140] Further examples of catalytic mTOR inhibitors include 8-(6-methoxy-pyridin-3-yl)-3-methyl-1-(4-piperazin-1-yl-3-trifluoromethyl-phenyl)-1,3-dihydro-imidazo[4,5-c]quinolin-2-one (WO2006/122806) and Ku-0063794 (Garcia-Martinez J M, et al., Biochem J., 2009, 421(1), 29-42. Ku-0063794 is a specific inhibitor of the mammalian target of rapamycin (mTOR).) WYE-354 is another example of a catalytic mTOR inhibitor (Yu K, et al. (2009). Biochemical, Cellular, and In vivo Activity of Novel ATP-Competitive and Selective Inhibitors of the Mammalian Target of Rapamycin. Cancer Res. 69(15): 6232-6240).

[1141] mTOR inhibitors useful according to the present invention also include prodrugs, derivatives, pharmaceutically acceptable salts, or analogs thereof of any of the foregoing. mTOR inhibitors, such as RAD001, may be formulated for delivery based on well-established methods in the art based on the particular dosages described herein. In particular, U.S. Pat. No. 6,004,973 (incorporated herein by reference) provides examples of formulations useable with the mTOR inhibitors described herein.

### Methods and Biomarkers for Evaluating CAR-Effectiveness or Sample Suitability

[1142] The present disclosure provides, among other things, gene signatures that indicate whether a cancer patient treated with a CAR therapy is likely to relapse, or has relapsed. Without wishing to be bound by theory, an experimental basis for this gene signature is set out in Example 12 on pages 528-532 of International Application WO 2016/164731, filed Apr. 8, 2016, which is incorporated by reference in its entirety.

[1143] In an embodiment, novel transcriptional gene signatures described e.g., in Table 29 (on page 530 International Application WO 2016/164731, filed Apr. 8, 2016, which is incorporated by reference in its entirety), are used to enable manufactured product improvements, thereby reducing the likelihood of patient relapse. In an embodiment, gene signatures described herein are used to modify therapeutic application of manufactured product, thereby reducing the likelihood of patient relapse.

[1144] In an embodiment, gene signatures described e.g., in Table 29 (on page 530 International Application WO 2016/164731, filed Apr. 8, 2016, which is incorporated by reference in its entirety) are identified in a subject prior to treatment with a CAR-expressing cell, e.g., CART treatment (e.g., a CART19 treatment, e.g., CTL019 therapy) that predict relapse to CAR treatment. In an embodiment, gene signatures described herein are identified in an apheresis sample or bone marrow sample. In an embodiment, gene signatures described herein are identified in a manufactured CAR-expressing cell product, e.g., CART product (e.g., a CART19 product, e.g., CTL019) prior to infusion.

[1145] In embodiments, a method of using the compositions described herein comprises assaying a gene signature that indicates whether a subject treated with the cell is likely to relapse, or has relapsed. In embodiments, the method comprises assaying the gene signature in the cell prior to infusion into the subject. In embodiments, the method further comprises decreasing the T_{REG} signature of a population of cells comprising the transduced cell. In embodiments, decreasing the T_{REG} signature comprises performing CD25-depletion on the population of cells.

[1146] In embodiments, a method comprises assaying a gene signature that indicates whether the subject is likely to relapse, or has relapsed. In embodiments, the method comprises assaying a gene signature in a subject prior to treatment with a CAR-expressing cell, e.g., CART treatment (e.g., a CART19 treatment, e.g., CTL019 therapy) that predicts relapse to CAR treatment. In embodiments, the level of one or more markers is the level of at least 2, 3, 4, 5, 6, 7, 8, 9, or 10 markers listed in Table 29 (on page 530 International Application WO 2016/164731, filed Apr. 8, 2016, which is incorporated by reference in its entirety). In embodiments, the level of the marker comprises an mRNA level or a level of a soluble protein.

[1147] This disclosure also provides evidence, for instance in Example 12, on pages 528-532 of International Application WO 2016/164731, filed Apr. 8, 2016, which is incorporated by reference in its entirety, that (without wishing to be bound by theory) decreasing the T_{REG} signature in the patient prior to apheresis or during manufacturing of the CART product reduces the risk of patient relapse.

[1148] In an embodiment, a patient is pre-treated with one or more therapies that reduce T_{REG} cells prior to collection of cells for CAR product manufacturing, e.g., CART product manufacturing, thereby reducing the risk of patient relapse to CAR-expressing cell treatment (e.g., CTL019 treatment). Methods of decreasing T_{REG} cells include, but are not limited to, cyclophosphamide, anti-GITR antibody, CD25-depletion, and combinations thereof.

[1149] In an embodiment, a patient is pre-treated with cyclophosphamide or an anti-GITR antibody prior to collection of cells for CAR-expressing cell product manufacturing, thereby reducing the risk of patient relapse to CAR-expressing cell treatment (e.g., CTL019 treatment).

[1150] In an embodiment, the CAR-expressing cell manufacturing process is modified to deplete T_{REG} cells prior to manufacturing of the CAR-expressing cell product (e.g., a CTL019 product). In an embodiment, CD25-depletion is used to deplete T_{REG} cells prior to manufacturing of the CAR-expressing cell product (e.g., a CTL019 product).

[1151] In an embodiment, after treating a patient or a CAR-expressing cell product with a treatment that reduces T_{REG} cells, the patient is treated with a combination therapy. The combination therapy may comprise, e.g., a CD19 inhibitor such as a CD19 CAR-expressing cell, and one or more B-cell inhibitors, e.g., B-cell inhibitors as described herein.

[1152] In an embodiment, a patient is assayed for the level of T_{REG} cells in a patient sample, e.g., a sample comprising cancer cells and/or a sample representing a tumor microenvironment. In an embodiment, this information is used to determine a course of treatment for the patient. For instance, in an embodiment, if the patient is identified as having elevated levels of T_{REG} cells compared to a control, the therapy comprises administering a treatment other than a CAR-expressing cell. For instance, the therapy may comprise administration of an antibody molecule, administration of a small molecule therapeutic, surgery, or radiation therapy, or any combination thereof. This therapy may target one or more B-cell antigens.

[1153] In embodiments, the characteristic of CD19 is a mutation in exon 2, e.g., a mutation causing a frameshift or a premature stop codon or both. In embodiments, the level of T_{REG} cells is determined by staining a sample for a marker expressed by T_{REG} cells. In embodiments, the level of T_{REG} cells is the level of Treg cells in a relevant location in the subject's body, e.g., in a cancer microenvironment.

[1154] In an embodiment, a relapser is a patient having, or who is identified as having, an increased level of expression (e.g., increase in RNA levels) of one or more of (e.g., 2, 3, 4, or all of) the following genes, compared to non relapsers: MIR199A1, MIR1203, uc02lovp, ITM2C, and HLA-DQB1 and/or a decreased levels of expression (e.g., decrease in RNA levels) of one or more of (e.g., 2, 3, 4, 5, 6, 7, 8, 9, 10, 11, or all of) the following genes, compared to non relapsers: PPIAL4D, TTTY10, TXLNG2P, MIR4650-1, KDM5D, USP9Y, PRKY, RPS4Y2, RPS4Y1, NCRNA00185, SULTIE1, and EIF1AY.

[1155] In another aspect, the invention features a method of evaluating or monitoring the effectiveness of a CAR-expressing cell therapy, in a subject (e.g., a subject having a cancer), or the suitability of a sample (e.g., an apheresis sample) for a CAR therapy, e.g., therapy including administration of a low, immune-enhancing dose of an mTOR inhibitor. The method includes acquiring a value of effectiveness to the CAR therapy, or sample suitability, wherein said value is indicative of the effectiveness or suitability of the CAR-expressing cell therapy.

[1156] In embodiments, the value of effectiveness to the CAR therapy, or sample suitability, comprises a measure of one, two, three, four, five, six or more (all) of the following:
[1157] (i) the level or activity of one, two, three, or more (e.g., all) of resting T_{EFF} cells, resting T_{REG} cells, younger T cells (e.g., younger CD4 or CD8 cells, or gamma/delta T cells), or early memory T cells, or a combination thereof, in a sample (e.g., an apheresis sample or a manufactured CAR-expressing cell product sample);
[1158] (ii) the level or activity of one, two, three, or more (e.g., all) of activated T_{EFF} cells, activated T_{REG} cells, older T cells (e.g., older CD4 or CD8 cells), or late memory T cells, or a combination thereof, in a sample (e.g., an apheresis sample or a manufactured CAR-expressing cell product sample);
[1159] (iii) the level or activity of an immune cell exhaustion marker, e.g., one, two or more immune checkpoint inhibitors (e.g., PD-1, PD-L1, TIM-3 and/or LAG-3) in a sample (e.g., an apheresis sample or a manufactured CAR-expressing cell product sample). In one embodiment, an immune cell has an exhausted phenotype, e.g., co-expresses at least two exhaustion markers, e.g., co-expresses PD-1 and TIM-3. In other embodiments, an immune cell has an exhausted phenotype, e.g., co-expresses at least two exhaustion markers, e.g., co-expresses PD-1 and LAG-3;
[1160] (iv) the level or activity of CD27 and/or CD45RO− (e.g., CD27+CD45RO−) immune effector cells, e.g., in a CD4+ or a CD8+ T cell population, in a sample (e.g., an apheresis sample or a manufactured CAR-expressing cell product sample);
[1161] (v) the level or activity of one, two, three, four, five, ten, twelve or more of the biomarkers chosen from CCL20, IL-17a and/or IL-6, PD-1, PD-L1, LAG-3, TIM-3, CD57, CD27, CD122, CD62L, KLRG1;
[1162] (vi) a cytokine level or activity (e.g., quality of cytokine repertoire) in a CAR-expressing cell product sample; or
[1163] (vii) a transduction efficiency of a CAR-expressing cell in a manufactured CAR-expressing cell product sample.

[1164] In some embodiments of any of the methods disclosed herein, the CAR-expressing cell therapy comprises a plurality (e.g., a population) of CAR-expressing immune effector cells, e.g., a plurality (e.g., a population) of T cells or NK cells, or a combination thereof. In one embodiment, the CAR-expressing cell therapy includes administration of a low, immune-enhancing dose of an mTOR inhibitor.

[1165] In some embodiments of any of the methods disclosed herein, the measure of one or more of (i)-(vii) is obtained from an apheresis sample acquired from the subject. The apheresis sample can be evaluated prior to infusion or re-infusion.

[1166] In some embodiments of any of the methods disclosed herein, the measure of one or more of (i)-(vii) is obtained from a manufactured CAR-expressing cell product sample. The manufactured CAR-expressing cell product can be evaluated prior to infusion or re-infusion.

[1167] In some embodiments of any of the methods disclosed herein, the subject is evaluated prior to receiving, during, or after receiving, the CAR-expressing cell therapy.

[1168] In some embodiments of any of the methods disclosed herein, the measure of one or more of (i)-(vii) evaluates a profile for one or more of gene expression, flow cytometry or protein expression.

[1169] In some embodiments of any of the methods disclosed herein, the method further comprises identifying the subject as a responder, a non-responder, a relapser or a non-relapser, based on a measure of one or more of (i)-(vii).

[1170] In some embodiments of any of the methods disclosed herein, a responder (e.g., a complete responder) has, or is identified as having, a greater level or activity of one, two, or more (all) of GZMK, PPF1BP2, or naïve T cells as compared to a non-responder.

[1171] In some embodiments of any of the methods disclosed herein, a non-responder has, or is identified as having, a greater level or activity of one, two, three, four, five, six, seven, or more (e.g., all) of IL22, IL-2RA, IL-21, IRF8, IL8, CCL17, CCL22, effector T cells, or regulatory T cells, as compared to a responder.

[1172] In an embodiment, a relapser is a patient having, or who is identified as having, an increased level of expression of one or more of (e.g., 2, 3, 4, or all of) the following genes, compared to non relapsers: MIR199A1, MIR1203, uc02lovp, ITM2C, and HLA-DQB1 and/or a decreased levels of expression of one or more of (e.g., 2, 3, 4, 5, 6, 7, 8, 9, 10, 11, or all of) the following genes, compared to non relapsers: PPIAL4D, TTTY10, TXLNG2P, MIR4650-1, KDM5D, USP9Y, PRKY, RPS4Y2, RPS4Y1, NCRNA00185, SULTIE1, and EIF1AY.

[1173] In some embodiments of any of the methods disclosed herein, a complete responder has, or is identified as having, a greater, e.g., a statistically significant greater, percentage of CD8+ T cells compared to a reference value, e.g., a non-responder percentage of CD8+ T cells.

[1174] In some embodiments of any of the methods disclosed herein, a complete responder has, or is identified as having, a greater percentage of CD27+ CD45RO-immune effector cells, e.g., in the CD8+ population, compared to a reference value, e.g., a non-responder number of CD27+ CD45RO-immune effector cells.

[1175] In some embodiments of any of the methods disclosed herein, a complete responder or a partial responder has, or is identified as having, a greater, e.g., a statistically significant greater, percentage of CD4+ T cells compared to a reference value, e.g., a non-responder percentage of CD4+ T cells.

[1176] In some embodiments of any of the methods disclosed herein, a complete responder has, or is identified as having, a greater percentage of one, two, three, or more (e.g., all) of resting T_{EFF} cells, resting T_{REG} cells, younger T cells (e.g., younger CD4 or CD8 cells, or gamma/delta T cells), or early memory T cells, or a combination thereof, compared to a reference value, e.g., a non-responder number of resting T_{EFF} cells, resting T_{REG} cells, younger T cells (e.g., younger CD4 or CD8 cells), or early memory T cells.

[1177] In some embodiments of any of the methods disclosed herein, a non-responder has, or is identified as having, a greater percentage of one, two, three, or more (e.g., all) of activated T_{EFF} cells, activated T_{REG} cells, older T cells (e.g., older CD4 or CD8 cells), or late memory T cells, or a combination thereof, compared to a reference value, e.g., a responder number of activated T_{EFF} cells, activated T_{REG} cells, older T cells (e.g., older CD4 or CD8 cells), or late memory T cells.

[1178] In some embodiments of any of the methods disclosed herein, a non-responder has, or is identified as having, a greater percentage of an immune cell exhaustion marker, e.g., one, two or more immune checkpoint inhibitors (e.g., PD-1, PD-L1, TIM-3 and/or LAG-3). In one embodiment, a non-responder has, or is identified as having, a greater percentage of PD-1, PD-L1, or LAG-3 expressing immune effector cells (e.g., CD4+ T cells and/or CD8+ T cells) (e.g., CAR-expressing CD4+ cells and/or CD8+ T cells) compared to the percentage of PD-1 or LAG-3 expressing immune effector cells from a responder.

[1179] In one embodiment, a non-responder has, or is identified as having, a greater percentage of immune cells having an exhausted phenotype, e.g., immune cells that co-express at least two exhaustion markers, e.g., co-expresses PD-1, PD-L1 and/or TIM-3. In other embodiments, a non-responder has, or is identified as having, a greater percentage of immune cells having an exhausted phenotype, e.g., immune cells that co-express at least two exhaustion markers, e.g., co-expresses PD-1 and LAG-3.

[1180] In some embodiments of any of the methods disclosed herein, a non-responder has, or is identified as having, a greater percentage of PD-1/PD-L1+/LAG-3+ cells in the CAR-expressing cell population compared to a responder (e.g., a complete responder) to the CAR-expressing cell therapy.

[1181] In some embodiments of any of the methods disclosed herein, a partial responder has, or is identified as having, a higher percentages of PD-1/PD-L1+/LAG-3+ cells, than a responder, in the CAR-expressing cell population.

[1182] In some embodiments of any of the methods disclosed herein, a non-responder has, or is identified as having, an exhausted phenotype of PD1/PD-L1+ CAR+ and co-expression of LAG3 in the CAR-expressing cell population.

[1183] In some embodiments of any of the methods disclosed herein, a non-responder has, or is identified as having, a greater percentage of PD-1/PD-L1+/TIM-3+ cells in the CAR-expressing cell population compared to the responder (e.g., a complete responder).

[1184] In some embodiments of any of the methods disclosed herein, a partial responders has, or is identified as having, a higher percentage of PD-1/PD-L1+/TIM-3+ cells, than responders, in the CAR-expressing cell population.

[1185] In some embodiments of any of the methods disclosed herein, the presence of CD8+CD27+CD45RO-T cells in an apheresis sample is a positive predictor of the subject response to a CAR-expressing cell therapy.

[1186] In some embodiments of any of the methods disclosed herein, a high percentage of PD1+ CAR+ and LAG3+ or TIM3+ T cells in an apheresis sample is a poor prognostic predictor of the subject response to a CAR-expressing cell therapy.

[1187] In some embodiments of any of the methods disclosed herein, the responder (e.g., the complete or partial responder) has one, two, three or more (or all) of the following profile:
[1188] (i) has a greater number of CD27+ immune effector cells compared to a reference value, e.g., a non-responder number of CD27+ immune effector cells;
[1189] (ii) has a greater number of CD8+ T cells compared to a reference value, e.g., a non-responder number of CD8+ T cells;
[1190] (iii) has a lower number of immune cells expressing one or more checkpoint inhibitors, e.g., a checkpoint inhibitor chosen from PD-1, PD-L1, LAG-3, TIM-3, or KLRG-1, or a combination, compared to a reference value, e.g., a non-responder number of cells expressing one or more checkpoint inhibitors; or
[1191] (iv) has a greater number of one, two, three, four or more (all) of resting TEFF cells, resting T_{REG} cells, naïve CD4 cells, unstimulated memory cells or early memory T cells, or a combination thereof, compared to a reference value, e.g., a non-responder number of resting T_{EFF} cells, resting T_{REG} cells, naïve CD4 cells, unstimulated memory cells or early memory T cells.

[1192] In some embodiments of any of the methods disclosed herein, the cytokine level or activity of (vi) is chosen from one, two, three, four, five, six, seven, eight, or more (or all) of cytokine CCL20/MIP3a, IL17A, IL6, GM-CSF, IFNT, IL10, IL13, IL2, IL21, IL4, IL5, IL9 or TNFα, or a combination thereof. The cytokine can be chosen from one, two, three, four or more (all) of IL-17a, CCL20, IL2, IL6, or TNFα. In one embodiment, an increased level or activity of a cytokine is chosen from one or both of IL-17a and CCL20, is indicative of increased responsiveness or decreased relapse.

[1193] In some embodiments of any of the methods disclosed herein, a transduction efficiency of 15% or higher in (vii) is indicative of increased responsiveness or decreased relapse.

[1194] In some embodiments of any of the methods disclosed herein, a transduction efficiency of less than 15% in (vii) is indicative of decreased responsiveness or increased relapse.

[1195] In embodiments, the responder, a non-responder, a relapser or a non-relapser identified by the methods herein can be further evaluated according to clinical criteria. For example, a complete responder has, or is identified as, a subject having a disease, e.g., a cancer, who exhibits a complete response, e.g., a complete remission, to a treatment. A complete response may be identified, e.g., using the NCCN Guidelines® (which are incorporated by reference herein in their entireties), as described herein. A partial responder has, or is identified as, a subject having a disease, e.g., a cancer, who exhibits a partial response, e.g., a partial remission, to a treatment. A partial response may be identified, e.g., using the NCCN Guidelines®, as described herein. A non-responder has, or is identified as, a subject having a disease, e.g., a cancer, who does not exhibit a response to a treatment, e.g., the patient has stable disease or progressive disease. A non-responder may be identified, e.g., using the NCCN Guidelines®, as described herein.

[1196] Alternatively, or in combination with the methods disclosed herein, responsive to said value, performing one, two, three, four or more of:
[1197] administering e.g., to a responder or a non-relapser, a CAR-expressing cell therapy;
[1198] administered an altered dosing of a CAR-expressing cell therapy;
[1199] altering the schedule or time course of a CAR-expressing cell therapy;
[1200] administering, e.g., to a non-responder or a partial responder, an additional agent in combination with a CAR-expressing cell therapy, e.g., a checkpoint inhibitor, e.g., a checkpoint inhibitor described herein;
[1201] administering to a non-responder or partial responder a therapy that increases the number of younger T cells in the subject prior to treatment with a CAR-expressing cell therapy;
[1202] modifying a manufacturing process of a CAR-expressing cell therapy, e.g., enriching for younger T cells prior to introducing a nucleic acid encoding a CAR, or increasing the transduction efficiency, e.g., for a subject identified as a non-responder or a partial responder;
[1203] administering an alternative therapy, e.g., for a non-responder or partial responder or relapser; or
[1204] if the subject is, or is identified as, a non-responder or a relapser, decreasing the T_{REG} cell population and/or T_{REG} gene signature, e.g., by one or more of CD25 depletion, administration of cyclophosphamide, anti-GITR antibody, or a combination thereof.

[1205] In certain embodiments, the subject is pre-treated with an anti-GITR antibody. In certain embodiment, the subject is treated with an anti-GITR antibody prior to infusion or re-infusion.

[1206] In some embodiments of the methods described herein, imaging with FDG-PET/CT (PET/CT) is performed on a subject who has been treated with a CAR therapy. This measurement can predict response to the therapy. For instance, in embodiments, metabolically active tumor volume (MTV) and/or [11F]-2-fluoro-2-deoxy-D-glucose (FDG) uptake are measured. In embodiments, a decrease in MTV is indicative of response, e.g., CR (complete response) or PR (partial response), e.g., a post-treatment MTV value of about 0 is indicative of CR, while an increase in MTV is indicative of PD (progressive disease). In embodiments, a decrease in FDG uptake is indicative of response, e.g., CR or PR, while an increase in FDG uptake is indicative of PD. In embodiments, the imaging is performed after administration of the CAR therapy, e.g., about 1 week, 2 weeks, 3 weeks, 4 weeks, 1 month, 2 months, 3 months, 4 months, 5 months, or 6 months after administration of the CAR therapy. In embodiments, the imaging is performed on a subject who does not have symptoms of CRS (cytokine release syndrome), e.g., a patient who suffered from CRS and whose symptoms resolved prior to imaging. In embodiments, the imaging is performed on a subject who has symptoms of CRS. In embodiments, imaging is performed prior to CAR therapy, and the pre-therapy image is compared to a post-therapy image. In embodiments, the subject has a cancer, e.g., lymphoma, e.g., diffuse large B-cell lymphoma (DLBCL) or follicular lymphoma (FL). In some embodiments, the CAR therapy comprises a CAR19-expressing cell, e.g., murine CTL019 or humanized CTL119 as described herein, e.g., Tables 2-3. In some embodiments, the CAR therapy comprises a CAR therapy described herein, e.g., a CAR20-expressing cell, a CAR22-expressing cell, or a CAR19-expressing cell, optionally in combination with a B-cell therapy.

### Personalized Medicine (Theranostics)

Cd19 Characteristics, e.g. Mutations

[1207] Without wishing to be bound by theory, some cancer patients show an initial response to a CD19 inhibitor such as a CD19 CAR-expressing cell, and then relapse. In some embodiments, the relapse is caused (at least in part) by a frameshift and/or premature stop codon in CD19 in the cancer cells, or other change in the expression (including expression levels) of CD19 which reduces the ability of a CD19 CAR-expressing cell to target the cancer cells. Such a mutation can reduce the effectiveness of the CD19 therapy and contribute to the patient's relapse. Accordingly, in some embodiments, it can be beneficial when a CD19 therapy is supplemented or replaced with a therapy directed to a second, different target, e.g., a target expressed in B-cells, e.g., one or more of CD10, CD20, CD22, CD34, CD123, FLT-3, or ROR1. Various exemplary combination therapies of this type are disclosed herein.

[1208] This application discloses, among other things, methods for treating a subject having cancer comprising one or more of: (1) determining if a subject has a difference, e.g., statistically significant difference, in a characteristic of CD19 relative to a reference characteristic, and (2) if there is a difference between the determined characteristic and reference characteristic, administering to the subject a therapeutically effective dose of a CAR therapy, e.g., CART, thereby treating the subject. The patient may be, e.g., a patient who has relapsed after treatment with a CD19 inhibitor, e.g., a CD19 CAR expressing cell. The patient may be a patient who has received or is receiving a CD19 CAR therapy and is at risk of relapse. The patient may be a non-responder to a CD19 CAR therapy.

[1209] In embodiments, the one or more cells that express a CAR molecule that binds CD19 are administered concurrently with, before, or after the one or more B-cell inhibitors.

[1210] In embodiments, the subject has or is identified as having a difference, e.g., a statistically significant difference, between a determined level compared to a reference level of one or more markers listed in Table 29 (on page 530 of International Application WO 2016/164731, filed Apr. 8, 2016, which is incorporated by reference in its entirety) in a biological sample.

[1211] In embodiments, the subject has or is identified as having a difference between a determined characteristic compared to a reference characteristic, in a characteristic of CD19, e.g., a mutation causing a frameshift or a premature stop codon or both, in a biological sample.

[1212] In embodiments, the subject has or is identified as having a difference, e.g., a statistically significant difference, between a determined level compared to a reference level of Treg cells in a biological sample.

[1213] Additional characteristics that can be measured to determine a therapeutically effectice dose of CAR therapy are described in pages 8-13, and 64-65 of International Application WO 2016/164731, filed Apr. 8, 2016, which is incorporated by reference in its entirety The characteristic can be, e.g., a CD19 sequence, e.g., protein or nucleic acid sequence.

[1214] The sequence can be determined, e.g., as described in the Examples, by high throughput nucleic acid sequencing, or by mass spectrometry of proteins. As described in the Example herein, a patient may relapse after CD19 CART therapy because of mutations in CD19, e.g., in exon 2 of CD19, e.g., a mutation that causes a frameshift and a premature stop codon in CD19. In embodiments, the insertion or deletion does not cause one or both of a frameshift and a premature stop codon. The mutation may be, e.g., an insertion, a deletion, a substitution, a translocation, or a combination of any of the foregoing. The insertion, deletion, or substitution may involve, e.g., at least 1, 2, 3, 4, 5, 10, 15, 20, 20, or 50 nucleotides. The insertion, deletion, or substitution may involve, e.g., at most 2, 3, 4, 5, 10, 15, 20, 20, 50, or 100 nucleotides. In some cases, a population of cells will comprise more than one mutation. In such cases, the mutations can be in overlapping or non-overlapping sub-populations of cells.

[1215] In some cases a patient is identified as having a CD19 characteristic that reduces CD19's ability to engage with a CD19 inhibitor such as a CD19 CAR expressing cell. Such a characteristic may be, e.g., a frameshift mutation, a premature stop codon, an alteration in nucleic acid sequence or an alteration in the structure of the primary mRNA transcript. The characteristic may be, e.g., a departure from normal production of CD19 that occurs earlier than splicing. The characteristic may be, e.g., a characteristic other than exon skipping. Such patients may be treated with an inhibitor of another target, e.g., a B-cell inhibitor, for example a CAR expressing cell directed against another epitope, e.g., an epitope within one or more of CD10, CD20, CD22, CD34, CD123, FLT-3, or ROR1.

[1216] In some cases, a patient is identified as having a CD19 characteristic that reduces CD19's ability to engage with a CD19 inhibitor, such as a CD19 CAR expressing cell, but does not reduce or abrogate CD19's ability to engage with a second CD19 inhibitor, such as a CD19 inhibitor that binds to a different region on CD19. Such a characteristic may be, e.g., a mutation that does not cause one or both of a frameshift mutation or a premature stop codon. Such a characteristic may be, e.g., an alteration in nucleic acid sequence or an alteration in the structure of the primary mRNA transcript, a departure from normal production of CD19 that occurs earlier than splicing, or a characteristic other than exon skipping. Such patients may be treated with an inhibitor of CD19, e.g., a B-cell inhibitor directed against an intact region of CD19, e.g., a wild-type portion of CD19. For instance, if a mutation is present in exon 2, the second CD19 inhibitor may bind to an exon other than exon 2, or a part of exon 2 that lacks the mutation. The second CD19 inhibitor may be, e.g., a CD19 inhibitor described herein.

T_{EFF} and T_{REG} Signatures

[1217] Methods herein can include steps of determining a T_{REG} signature or determining the levels of T_{EFF} cells or T_{REG} cells, e.g., in a patient or in a population of cells e.g., immune cells. Methods herein can also include steps of reducing the level of T_{REG} cells, or decreasing a T_{REG} signature, in a patient or in a population of cells. In some embodiments, a T_{EFF} is a cell with upregulated expression of one or more (e.g., at least 10, 20, 30, 40, 50, 60, 70, 80, or all) of the following genes: AIM2, ALAS1, B4GALT5, BATF, C3orf26, C4orf43, CCL3, CCL4, CCT3, CCT7, CD40LG, CHAC2, CSF2, CTNNA1, EBNA1BP2, EDARADD, EEF1E1, EIF2B3, EIF2S1, FABP5, FAM40B, FKBP4, FOSL1, GFOD1, GLRX2, HSPD1, HSPE1, IFNG, IL15RA, IL21, IL2RA, IL3, KCNK5, KIAA0020, LARP4, LRP8, LTA, MANF, MIR1182, MIR155, MIR155HG, MTCH2, MYOF, NDUFAF1, NLN, NME1, NME1-NME2, OTUD7B, PAM, PDIA6, PEA15, PFKM, PGAM1, PGAM4, PPIL1, PRDX4, PRSS23, PSMD1, PSMD11, PSMD14, PTRH2, PUS7, RBBP8, RPF2, RPP25, SFXN1, SLC27A2, SLC39A14, SLC43A3, SORD, SPR, SRXN1, STIP1, STT3A, TBX21, TMCC2, TMEM165, TNFRSF9, TXN, TXNDC5, UCK2, VDR, WDR12, YWHAG, and ZDHHC16. In some embodiments, a T_{REG} cell is a cell with upregulated expression of one or more (e.g., at least 10, 20, 30, 40, 50, 60, 70, or all) of the following genes: AIM2, ALAS1, BATF, C5orf32, CCL17, CD40LG, CHAC2, CSF1, CTSL1, EBNA1BP2, EDARADD, EMP1, EPAS1, FABP5, FAM40B, FKBP4, FOSL1, GCLM, GK, GPR56, HMOX1, HSPD1, HSPE1, IKBIP, IL10, IL13, IL15RA, IL1RN, IL2RA, IL3, IL4, IL5, IL9, KCNK5, LTA, MANF, MIR1182, MIR155, MIR155HG, MYOF, NDUFAF1, NLN, NME1, NME1-NME2, PANX2, PDIA6, PGAM4, PPIL1, PPPDE2, PRDX4, PRKAR1B, PSMD1, PSMD11, PUS7, RBBP8, SLC27A2, SLC39A14, SLC43A3, SRXN1, STIP1, STT3A, TBX21, TNFRSF11A, TNFRSFlB, TNFRSF8, TNFRSF9, TXN, UCK2, VDR, VTRNAl-3, WDR12, YWHAG, ZDHHC16, and ZNF282. The upregulated expression may be, e.g., measured 16 hours after stimulation. The upregulated expression may be determined, e.g., by measuring RNA levels for the indicated genes.

[1218] In embodiments, the method comprises decreasing the T_{REG} signature in the subject prior to apheresis. In embodiments, the method further comprises decreasing the T_{REG} signature in the subject, e.g., by administering cyclophosphamide, an anti-GITR antibody, or both to the subject. In embodiments, the method comprises pre-treating a subject with cyclophosphamide, an anti-GITR antibody, or both, prior to collection of cells for CAR-expressing cell product manufacturing. In embodiments, the method further comprises obtaining a sample from the subject, wherein the sample comprises a cellular fraction (e.g., which comprises blood), a tissue fraction, an apheresis sample, or a bone marrow sample.

### Pharmaceutical Compositions and Treatments

[1219] Pharmaceutical compositions of the present invention may comprise, in some aspects, a CAR-expressing cell, e.g., a plurality of CAR-expressing cells, as described herein, in combination with one or more pharmaceutically or physiologically acceptable carriers, diluents or excipients. Such compositions may comprise buffers such as neutral buffered saline, phosphate buffered saline and the like; carbohydrates such as glucose, mannose, sucrose or dextrans, mannitol; proteins; polypeptides or amino acids such as glycine; antioxidants; chelating agents such as EDTA or glutathione; adjuvants (e.g., aluminum hydroxide); and preservatives. Compositions of the present invention are in one aspect formulated for intravenous administration.

[1220] Pharmaceutical compositions of the present invention may be administered in a manner appropriate to the disease to be treated (or prevented). The quantity and frequency of administration will be determined by such factors as the condition of the patient, and the type and severity of the patient's disease, although appropriate dosages may be determined by clinical trials.

[1221] In one embodiment, the pharmaceutical composition is substantially free of, e.g., there are no detectable levels of a contaminant, e.g., selected from the group consisting of endotoxin, mycoplasma, replication competent lentivirus (RCL), p24, VSV-G nucleic acid, HIV gag, residual anti-CD3/anti-CD28 coated beads, mouse antibodies, pooled human serum, bovine serum albumin, bovine serum, culture media components, vector packaging cell or plasmid components, a bacterium and a fungus. In one embodiment, the bacterium is at least one selected from the group consisting of Alcaligenes faecalis, Candida albicans, Escherichia coli, Haemophilus influenza, Neisseria meningitides, Pseudomonas aeruginosa, Staphylococcus aureus, Streptococcus pneumonia, and Streptococcus pyogenes group A.

[1222] When “an immunologically effective amount,” “an anti-tumor effective amount,” “a tumor-inhibiting effective amount,” or “therapeutic amount” is indicated, the precise amount of the compositions of the present invention to be administered can be determined by a physician with consideration of individual differences in age, weight, tumor size, extent of infection or metastasis, and condition of the patient (subject). In some embodiments, a pharmaceutical composition comprising the cells, e.g., T cells described herein may be administered at a dosage of 10⁴ to 10⁹ cells/kg body weight, in some instances 10⁵ to 10⁶ cells/kg body weight, including all integer values within those ranges. In some embodiments, the cells, e.g., T cells described herein may be administered at 3×10⁴, 1×10⁶, 3×10⁶, or 1×10⁷ cells/kg body weight. The cell compositions may also be administered multiple times at these dosages. The cells can be administered by using infusion techniques that are commonly known in immunotherapy (see, e.g., Rosenberg et al., New Eng. J. of Med. 319:1676, 1988).

[1223] In some embodiments, a dose of CAR cells (e.g., CD19 or BCMA CAR cells) comprises about 1×10⁵, 2×10⁵, 5×10⁵, 1×10⁶, 1.1×10⁶, 2×10⁶, 3.6×10⁶, 5×10⁶, 1×10⁷, 1.8×10⁷, 2×10⁷, 5×10⁷, 1×10⁸, 2×10⁸, or 5×10⁸ cells/kg. In some embodiments, a dose of CAR cells (e.g., CD19 or BCMA CAR cells) comprises at least about 1×10⁵, 2×10⁵, 5×10⁵, 1×10⁶, 1.1×10⁶,2×10⁶, 3.6×10⁶,5×10⁶, 1×10⁷, 1.8×10⁷, 2×10⁷, 5×10⁷, 1×10⁸, 2×10⁸, or 5×10⁸ cells/kg. In some embodiments, a dose of CAR cells (e.g., CD19 or BCMA CAR cells) comprises up to about 1×10⁵, 2×10⁵, 5×10⁵, 1×10⁶, 1.1×10⁶, 2×10⁶, 3.6 ×10⁶, 5×10⁶, 1×10⁷, 1.8×10⁷, 2×10⁷, 5×10⁷, 1×10⁸, 2×10⁸, or 5×10⁸ cells/kg. In some embodiments, a dose of CAR cells (e.g., CD19 or BCMA CAR cells) comprises about 1.1×10⁶-1.8×10⁷ cells/kg or about 8×10⁵-1.5×10⁶ cells/kg. In some embodiments, a dose of CAR cells (e.g., CD19 or BCMA CAR cells) comprises about 1×10⁷, 2×10⁷, 5×10⁷, 1×10⁸, 2×10⁸, 5×10⁸, 1×10⁹, 2×10⁹, or 5×10⁹ cells. In some embodiments, a dose of CAR cells (e.g., CD19 or BCMA CAR cells) comprises at least about 1×10⁷, 2×10⁷, 5×10⁷, 1×10⁸, 2×10⁸, 5×10⁸, 1×10⁹, 2×10⁹, or 5×10⁹ cells. In some embodiments, a dose of CAR cells (e.g., CD19 or BCMA CAR cells) comprises up to about 1×10⁷, 2×10⁷, 5×10⁷, 1×10⁸, 2×10⁸, 5×10⁸, 1×10⁹, 2×10⁹, or 5×10⁹ cells.

[1224] In certain aspects, it may be desired to administer activated cells, e.g., T cells or NK cells, to a subject and then subsequently redraw blood (or have an apheresis performed), activate the cells therefrom according to the present invention, and reinfuse the patient with these activated and expanded cells. This process can be carried out multiple times every few weeks. In certain aspects, cells, e.g., T cells or NK cells, can be activated from blood draws of from 10 cc to 400 cc. In certain aspects, cells, e.g., T cells or NK cells, are activated from blood draws of 20 cc, 30 cc, 40 cc, 50 cc, 60 cc, 70 cc, 80 cc, 90 cc, or 100 cc.

[1225] The administration of the subject compositions may be carried out in any convenient manner, including by aerosol inhalation, injection, ingestion, transfusion, implantation or transplantation. The compositions described herein may be administered to a patient trans arterially, subcutaneously, intradermally, intratumorally, intranodally, intramedullary, intramuscularly, by intravenous (i.v.) injection, or intraperitoneally. In one aspect, the cell compositions, e.g., T cell or NK cell compositions, of the present invention are administered to a patient by intradermal or subcutaneous injection. In one aspect, the cell compositions e.g., T cell or NK cell compositions, of the present invention are administered by i.v. injection. The compositions of cells e.g., T cell or NK cell compositions, may be injected directly into a tumor, lymph node, or site of infection.

[1226] In a particular exemplary aspect, subjects may undergo leukapheresis, wherein leukocytes are collected, enriched, or depleted ex vivo to select and/or isolate the cells of interest, e.g., T cells. These cell isolates, e.g., T cell or NK cell isolates, may be expanded by methods known in the art and treated such that one or more CAR constructs of the invention may be introduced, thereby creating a CAR-expressing cell, e.g., CAR T cell of the invention. Subjects in need thereof may subsequently undergo standard treatment with high dose chemotherapy followed by peripheral blood stem cell transplantation. In certain aspects, following or concurrent with the transplant, subjects receive an infusion of the expanded CAR-expressing cells of the present invention. In an additional aspect, expanded cells are administered before or following surgery.

[1227] The dosage of the above treatments to be administered to a patient will vary with the precise nature of the condition being treated and the recipient of the treatment. The scaling of dosages for human administration can be performed according to art-accepted practices. The dose for a therapeutic, e.g., an antibody, e.g., CAMPATH, for example, may be, e.g., in the range 1 to about 100 mg for an adult patient, e.g., administered daily for a period between 1 and 30 days. A suitable daily dose is 1 to 10 mg per day although in some instances larger doses of up to 40 mg per day may be used (described in U.S. Pat. No. 6,120,766).

[1228] In one embodiment, the CAR is introduced into cells, e.g., T cells or NK cells, e.g., using in vitro transcription, and the subject (e.g., human) receives an initial administration of CAR-expressing cells, e.g., CAR T cells of the invention, and one or more subsequent administrations of the CAR-expressing cells, e.g., CAR T cells of the invention, wherein the one or more subsequent administrations are administered less than 15 days, e.g., 14, 13, 12, 11, 10, 9, 8, 7, 6, 5, 4, 3, or 2 days after the previous administration. In one embodiment, more than one administration of the CAR-expressing cells, e.g., CAR T cells of the invention are administered to the subject (e.g., human) per week, e.g., 2, 3, or 4 administrations of the CAR-expressing cells, e.g., CAR T cells of the invention are administered per week. In one embodiment, the subject (e.g., human subject) receives more than one administration of the CAR-expressing cells, e.g., CAR T cells per week (e.g., 2, 3 or 4 administrations per week) (also referred to herein as a cycle), followed by a week of no CAR-expressing cells, e.g., CAR T cells administrations, and then one or more additional administration of the CAR-expressing cells, e.g., CAR T cells (e.g., more than one administration of the CAR-expressing cells, e.g., CAR T cells per week) is administered to the subject. In another embodiment, the subject (e.g., human subject) receives more than one cycle of CAR-expressing cells, e.g., CAR T cells, and the time between each cycle is less than 10, 9, 8, 7, 6, 5, 4, or 3 days. In one embodiment, the CAR-expressing cells, e.g., CAR T cells are administered every other day for 3 administrations per week. In one embodiment, the CAR-expressing cells, e.g., CAR T cells of the invention are administered for at least two, three, four, five, six, seven, eight or more weeks.

[1229] In some embodiments, subjects may be adult subjects (i.e., 18 years of age and older). In certain embodiments, subjects may be between 1 and 30 years of age. In some embodiments, the subjects are 16 years of age or older. In certain embodiments, the subjects are between 16 and 30 years of age. In some embodiments, the subjects are child subjects (i.e., between 1 and 18 years of age).

[1230] In one aspect, CAR-expressing cells, e.g., CARTs are generated using lentiviral viral vectors, such as lentivirus. CAR-expressing cells, e.g., CARTs generated that way will have stable CAR expression.

[1231] In one aspect, CAR-expressing cells, e.g., CARTs, are generated using a viral vector such as a gammaretroviral vector, e.g., a gammaretroviral vector described herein. CARTs generated using these vectors can have stable CAR expression.

[1232] In one aspect, CAR-expressing cells, e.g., CARTs transiently express CAR vectors for 4, 5, 6, 7, 8, 9, 10, 11, 12, 13, 14, 15 days after transduction. Transient expression of CARs can be effected by RNA CAR vector delivery. In one aspect, the CAR RNA is transduced into the cell, e.g., NK cell or T cell, by electroporation.

[1233] A potential issue that can arise in patients being treated using transiently expressing CAR T cells (particularly with murine scFv bearing CARTs) is anaphylaxis after multiple treatments.

[1234] Without being bound by this theory, it is believed that such an anaphylactic response might be caused by a patient developing humoral anti-CAR response, i.e., anti-CAR antibodies having an anti-IgE isotype. It is thought that a patient's antibody producing cells undergo a class switch from IgG isotype (that does not cause anaphylaxis) to IgE isotype when there is a ten to fourteen day break in exposure to antigen.

[1235] If a patient is at high risk of generating an anti-CAR antibody response during the course of transient CAR therapy (such as those generated by RNA transductions), CART infusion breaks should not last more than ten to fourteen days.

### CAR22

[1236] Design, function and sequences of CAR22 constructs, and exemplary CAR22 constructs, are described, e.g., in pages 363-422 of International Application WO 2016/164731, filed Apr. 8, 2016, which is incorporated by reference in its entirety.

[1237] The sequences of the human CARs are provided in Table 6A and 6B on pages 364-404 of International Application WO 2016/164731, filed Apr. 8, 2016, which is incorporated by reference in its entirety. The clones, which are incorporated by reference herein, all contained a Q/K residue change in the signal domain of the co-stimulatory domain derived from CD3zeta chain. Several CD22 scFv sequences were generated and are described in Table 6B on pages 403-404 of International Application WO 2016/164731.

[1238] In some embodiments, the antigen binding domain of a CD22 CAR construct comprises a HC CDR1, a HC CDR2, and a HC CDR3 of any heavy chain binding domain amino acid sequences listed in Table 6A or 6B on pages 364-404 of International Application WO 2016/164731, filed Apr. 8, 2016, which is incorporated by reference in its entirety and further comprises a LC CDR1, a LC CDR2, and a LC CDR3 of any light chain binding domain amino acid sequences listed in Table 6A or 6B on pages 364-404 of International Application WO 2016/164731.

[1239] In some embodiments, the antigen binding domain of a CD22 CAR construct comprises one, two or all of LC CDR1, LC CDR2, and LC CDR3 of any light chain binding domain amino acid sequences listed in Table 6A or 6B on pages 364-404 of International Application WO 2016/164731, and one, two or all of HC CDR1, HC CDR2, and HC CDR3 of any heavy chain binding domain amino acid sequences listed in Table 6A or 6B on pages 364-404 of International Application WO 2016/164731.

[1240] The sequences of human CDR sequences of the scFv domains of a CD22 CAR construct are shown in Table 7A, 7B, or 7C on pages 406-411 of International Application WO 2016/164731 for the heavy chain variable domains and in Table 8A or 8B for the light chain variable domains on pages 412-414 of International Application WO 2016/164731.

[1241] In some embodiments, the antigen binding domain of a CD22 CAR construct comprises a HC CDR1, a HC CDR2, and a HC CDR3 of any heavy chain binding domain amino acid sequences listed in Table 9A or 9B on pages 414-418 of International Application WO 2016/164731. In embodiments, the antigen binding domain further comprises a LC CDR1, a LC CDR2, and a LC CDR3. In embodiments, the antigen binding domain comprises a LC CDR1, a LC CDR2, and a LC CDR3 of any light chain binding domain amino acid sequences listed in Table 10A or 10B on pages 418-421 of International Application WO 2016/164731.

[1242] In some embodiments, the antigen binding domain of a CD22 CAR construct comprises one, two or all of LC CDR1, LC CDR2, and LC CDR3 of any light chain binding domain amino acid sequences listed in Table 10A or 10B on pages 418-421 of International Application WO 2016/164731, and one, two or all of HC CDR1, HC CDR2, and HC CDR3 of any heavy chain binding domain amino acid sequences listed in Table 9A or 9B on pages 414-418 of International Application WO 2016/164731.

[1243] The order of the VL and VH domains in the scFv, the presence of a linker, and mutations in the CD3 zeta chain are described, e.g., on lines 8-15 on page 422 of International Application WO 2016/164731, filed Apr. 8, 2016, which is incorporated by reference in its entirety

### CAR20 Constructs

[1244] Design, function and sequences of CAR20 constructs, and exemplary CAR20 constructs, are described, e.g., in pages 422-454 of International Application WO 2016/164731, filed Apr. 8, 2016, which is incorporated by reference in its entirety.

[1245] Isolated anti-CD20 single chain variable fragments and sequences of exemplary CD20 CARs are described in Table 11A and 11B on pages 422-446 of International Application WO 2016/164731.

[1246] In some embodiments, the antigen binding domain of a CD20 CAR construct comprises a HC CDR1, a HC CDR2, and a HC CDR3 of any heavy chain binding domain amino acid sequences listed in Table 11A and 11B on pages 422-446 of International Application WO 2016/164731. In embodiments, the antigen binding domain further comprises a LC CDR1, a LC CDR2, and a LC CDR3. In embodiments, the antigen binding domain of a CD20 CAR construct comprises a LC CDR1, a LC CDR2, and a LC CDR3 of any light chain binding domain amino acid sequences listed in Table 11A and 11B on pages 422-446 of International Application WO 2016/164731.

[1247] In some embodiments, the antigen binding domain of a CD20 CAR construct comprises one, two or all of LC CDR1, LC CDR2, and LC CDR3 of any light chain binding domain amino acid sequences listed in Table 11A and 11B on pages 422-446 of International Application WO 2016/164731, and one, two or all of HC CDR1, HC CDR2, and HC CDR3 of any heavy chain binding domain amino acid sequences listed in Table 11A and 11B on pages 422-446 of International Application WO 2016/164731.

[1248] The sequences of human CDR sequences of the scFv domains of a CD20 CAR construct are shown in Table 12A, Table12B or Table 13 on pages 447-449 of International Application WO 2016/164731.

[1249] In some embodiments, the antigen binding domain of a CD20 CAR construct comprises a HC CDR1, a HC CDR2, and a HC CDR3 of any heavy chain binding domain amino acid sequences listed in Table 14A or 14B on pages 450-452 of International Application WO 2016/164731, and further comprises a LC CDR1, a LC CDR2, and a LC CDR3 of any light chain binding domain amino acid sequences listed in Table 15A or 15B on pages 452-454 of International Application WO 2016/164731.

[1250] In some embodiments, the antigen binding domain comprises one, two or all of LC CDR1, LC CDR2, and LC CDR3 of any light chain binding domain amino acid sequences listed in Table 15A or 15B on pages 452-454 of International Application WO 2016/164731, and one, two or all of HC CDR1, HC CDR2, and HC CDR3 of any heavy chain binding domain amino acid sequences listed in Table 14A or 14B on pages 450-452 of International Application WO 2016/164731.

### CAR123 Constructs

[1251] Design, function and sequences of CAR123 constructs, and exemplary CAR123 constructs, are described, e.g., in pages 454-501 of International Application WO 2016/164731, filed Apr. 8, 2016, which is incorporated by reference in its entirety.

[1252] The sequences of exemplary human CD123 CARs are provided in Table 16 on pages 455-459 of International Application WO 2016/164731.

[1253] The order of the VL and VH domains in the scFv, the presence of a linker, and mutations in the CD3 zeta chain are described, e.g., on lines 27-29 on page 454, and lines 5-9 on page 455 of International Application WO 2016/164731, filed Apr. 8, 2016, which is incorporated by reference in its entirety.

[1254] In some embodiments, the antigen binding domain of a CD123 CAR construct comprises a HC CDR1, a HC CDR2, and a HC CDR3 of any heavy chain binding domain amino acid sequences listed in Table 16 on pages 455-459 of International Application WO 2016/164731, and further comprises a LC CDR1, a LC CDR2, and a LC CDR3 of any light chain binding domain amino acid sequences listed in Table 16 on pages 455-459 of International Application WO 2016/164731.

[1255] In some embodiments, the antigen binding domain of a CD123 CAR construct comprises one, two or all of LC CDR1, LC CDR2, and LC CDR3 of any light chain binding domain amino acid sequences listed in Table 16 on pages 455-459 of International Application WO 2016/164731, and one, two or all of HC CDR1, HC CDR2, and HC CDR3 of any heavy chain binding domain amino acid sequences listed in Table 16 on pages 455-459 of International Application WO 2016/164731.

[1256] The sequences of human CDR sequences of the scFv domains of a CD123 CAR construct are shown in Table 17 and Table 18 on page 460 of International Application WO 2016/164731.

[1257] In an embodiment, the B-cell inhibitor comprises a CD123 CAR which comprises an antibody or antibody fragment which includes a CD123 binding domain, wherein said CD123 binding domain comprises one or more of light chain complementary determining region 1 (LC CDR1), light chain complementary determining region 2 (LC CDR2), and light chain complementary determining region 3 (LC CDR3) amino acid sequence listed in Table 18, Table 20, Table 22, or Table 24 of International Application WO 2016/164731, and one or more of heavy chain complementary determining region 1 (HC CDR1), heavy chain complementary determining region 2 (HC CDR2), and heavy chain complementary determining region 3 (HC CDR3) of any CD123 heavy chain binding domain amino acid sequence listed in Table 17, Table 19, Table 21, or Table 23 of International Application WO 2016/164731.

[1258] Additional CD123 CDR sequences of the scFv domains are described in Tables 19-24 on pages 461-463 of International Application WO 2016/164731.

[1259] Additional description of these CD123 CARs is provided, for instance, in PCT/CN2014/090508, which is incorporated by reference herein in its entirety.

[1260] Generation of CART-CD123, evaluation of cytolytic activity of CART-CD123, T cell transduction, degranulation, cytotoxicity and in vivo efficacy are described, e.g., in FIGS. 42-48 on pages 647-656 of International Application WO 2016/164731, filed Apr. 8, 2016, which is incorporated by reference in its entirety.

[1261] Humanized anti-CD123 single chain variable fragments (scFv) are described, e.g., on lines 8-11 on page 467 of International Application WO 2016/164731, and the sequence of the humanized CARs are provided in Table 25 on page 467-500 of International Application WO 2016/164731. The sequences of humanized CDR sequences of the scFv domains of hzCD123 CAR 1-32 are shown in Table 26 and Table 27 on pages 500-501 of International Application WO 2016/164731. In some embodiments, the CAR123 has a HCDR3 having the sequence YCARGNWDDY, as described e.g., on lines 8-9on page 501 of International Application WO 2016/164731.

[1262] The order of the VL and VH domains in the scFv, the presence of a linker, and mutations in the CD3 zeta chain are described, e.g., on lines 12-19 on page 467 of International Application WO 2016/164731, filed Apr. 8, 2016, which is incorporated by reference in its entirety.

### Bispecific CAR19/CAR22 Constructs and Function Thereof

[1263] The production and function of bispecific CAR19/CAR22 constructs is described, e.g., on pages 501-506 of International Application WO 2016/164731, filed Apr. 8, 2016, which is incorporated by reference in its entirety. The anti-CD19 base molecule is a humanized anti-CD19 sequence, provided as construct ID 104876 of Table 2, which uses the LH orientation.

[1264] The nucleotide and amino acid sequences of CAR19/CAR22 constructs,are provided in Table 28 on pages 501-508 of International Application WO 2016/164731.

[1265] In some embodiments, the antigen binding domain comprises a HC CDR1, a HC CDR2, and a HC CDR3 of any heavy chain binding domain amino acid sequences listed in Table 28 on pages 501-508 of International Application WO 2016/164731, and further comprises a LC CDR1, a LC CDR2, and a LC CDR3 of any light chain binding domain amino acid sequences listed in Table 28 on pages 501-508 of International Application WO 2016/164731.

[1266] In some embodiments, the antigen binding domain comprises one, two or all of LC CDR1, LC CDR2, and LC CDR3 of any light chain binding domain amino acid sequences listed in Table 28 on pages 501-508 of International Application WO 2016/164731, and one, two or all of HC CDR1, HC CDR2, and HC CDR3 of any heavy chain binding domain amino acid sequences listed in Table 28 on pages 501-508 of International Application WO 2016/164731.

[1267] Activity of CD19 and CD22 scFvs against their targets is described, e.g., on lines 6-9 on page 506 of International Application WO 2016/164731.

### Additional CARs and Binding Domains

[1268] In other embodiments, the CAR-expressing cells can specifically bind to CD123, e.g., can include a CAR molecule (e.g., any of the CAR1-CAR8), or an antigen binding domain according to Tables 1-2 of WO 2014/130635, incorporated herein by reference.

[1269] In an embodiment, the CAR molecule comprises a CD123 CAR described herein, e.g., a CD123 CAR described in US2014/0322212A1 or US2016/0068601A1, both incorporated herein by reference. In embodiments, the CD123 CAR comprises an amino acid, or has a nucleotide sequence shown in US2014/0322212A1 or US2016/0068601A1, both incorporated herein by reference.

[1270] In other embodiments, the CAR-expressing cells can specifically bind to EGFRvIII, e.g., can include a CAR molecule, or an antigen binding domain according to Table 2 or SEQ ID NO:11 of WO 2014/130657, incorporated herein by reference.

[1271] In an embodiment, the CAR molecule comprises an EGFRvIII CAR molecule described herein, e.g., an EGFRvIII CAR described US2014/0322275A1, incorporated herein by reference. In embodiments, the EGFRvIII CAR comprises an amino acid, or has a nucleotide sequence shown in US2014/0322275A1, incorporated herein by reference.

[1272] In other embodiments, the CAR-expressing cells can specifically bind to mesothelin, e.g., can include a CAR molecule, or an antigen binding domain according to Tables 2-3 of WO 2015/090230, incorporated herein by reference.

[1273] In an embodiment, the CAR molecule comprises a mesothelin CAR described herein, e.g., a mesothelin CAR described in WO 2015/090230, incorporated herein by reference. In embodiments, the mesothelin CAR comprises an amino acid, or has a nucleotide sequence shown in WO 2015/090230, incorporated herein by reference.

[1274] In one embodiment, CAR molecule comprises a BCMA CAR molecule described herein, e.g., a BCMA CAR described in US-2016-0046724-A1. In embodiments, the BCMA CAR comprises an amino acid, or has a nucleotide sequence shown in US-2016-0046724-A1, incorporated herein by reference.

[1275] In an embodiment, the CAR molecule comprises a CLL1 CAR described herein, e.g., a CLL1 CAR described in US2016/0051651A1, incorporated herein by reference. In embodiments, the CLL1 CAR comprises an amino acid, or has a nucleotide sequence shown in US2016/0051651A1, incorporated herein by reference.

[1276] In an embodiment, the CAR molecule comprises a CD33 CAR described herein, e.ga CD33 CAR described in US2016/0096892A1, incorporated herein by reference. In embodiments, the CD33 CAR comprises an amino acid, or has a nucleotide sequence shown in US2016/0096892A1, incorporated herein by reference.

[1277] In accordance with any method or composition described herein, in embodiments, a CAR molecule comprises a CD123 CAR described herein, e.g., a CD123 CAR described in US2014/0322212A1 or US2016/0068601A1, both incorporated herein by reference. In embodiments, the CD123 CAR comprises an amino acid, or has a nucleotide sequence shown in US2014/0322212A1 or US2016/0068601A1, both incorporated herein by reference. In other embodiments, a CAR molecule comprises a CD19 CAR molecule described herein, e.g., a CD19 CAR molecule described in US-2015-0283178-A1, e.g., CTL019. In embodiments, the CD19 CAR comprises an amino acid, or has a nucleotide sequence shown in US-2015-0283178-A1, incorporated herein by reference. In one embodiment, CAR molecule comprises a BCMA CAR molecule described herein, e.g., a BCMA CAR described in US-2016-0046724-AL. In embodiments, the BCMA CAR comprises an amino acid, or has a nucleotide sequence shown in US-2016-0046724-A1, incorporated herein by reference. In an embodiment, the CAR molecule comprises a CLL1 CAR described herein, e.g., a CLL1 CAR described in US2016/0051651A1, incorporated herein by reference. In embodiments, the CLL1 CAR comprises an amino acid, or has a nucleotide sequence shown in US2016/0051651A1, incorporated herein by reference. In an embodiment, the CAR molecule comprises a CD33 CAR described herein, e.g., a CD33 CAR described in US2016/0096892A1, incorporated herein by reference. In embodiments, the CD33 CAR comprises an amino acid, or has a nucleotide sequence shown in US2016/0096892A1, incorporated herein by reference. In an embodiment, the CAR molecule comprises an EGFRvIII CAR molecule described herein, e.g., an EGFRvIII CAR described US2014/0322275A1, incorporated herein by reference. In embodiments, the EGFRvIII CAR comprises an amino acid, or has a nucleotide sequence shown in US2014/0322275A1, incorporated herein by reference. In an embodiment, the CAR molecule comprises a mesothelin CAR described herein, e.g., a mesothelin CAR described in WO 2015/090230, incorporated herein by reference. In embodiments, the mesothelin CAR comprises an amino acid, or has a nucleotide sequence shown in WO 2015/090230, incorporated herein by reference.

[1278] Exemplary CD19 CARs include CD19 CARs described herein, e.g., in one or more tables described herein, or an anti-CD19 CAR described in Xu et al. Blood 123.24(2014):3750-9; Kochenderfer et al. Blood 122.25(2013):4129-39, Cruz et al. Blood 122.17(2013):2965-73, NCT00586391, NCT01087294, NCT02456350, NCT00840853, NCT02659943, NCT02650999, NCT02640209, NCT01747486, NCT02546739, NCT02656147, NCT02772198, NCT00709033, NCT02081937, NCT00924326, NCT02735083, NCT02794246, NCT02746952, NCT01593696, NCT02134262, NCT01853631, NCT02443831, NCT02277522, NCT02348216, NCT02614066, NCT02030834, NCT02624258, NCT02625480, NCT02030847, NCT02644655, NCT02349698, NCT02813837, NCT02050347, NCT01683279, NCT02529813, NCT02537977, NCT02799550, NCT02672501, NCT02819583, NCT02028455, NCT01840566, NCT01318317, NCT01864889, NCT02706405, NCT01475058, NCT01430390, NCT02146924, NCT02051257, NCT02431988, NCT01815749, NCT02153580, NCT01865617, NCT02208362, NCT02685670, NCT02535364, NCT02631044, NCT02728882, NCT02735291, NCT01860937, NCT02822326, NCT02737085, NCT02465983, NCT02132624, NCT02782351, NCT01493453, NCT02652910, NCT02247609, NCT01029366, NCT01626495, NCT02721407, NCT01044069, NCT00422383, NCT01680991, NCT02794961, or NCT02456207, each of which is incorporated herein by reference in its entirety.

[1279] In one embodiment, the antigen binding domain comprises one, two three (e.g., all three) heavy chain CDRs, HC CDR1, HC CDR2 and HC CDR3, from an antibody described herein (e.g., an antibody described in WO2015/142675, US-2015-0283178-A1, US-2016-0046724-A1, US2014/0322212A1, US2016/0068601A1, US2016/0051651A1, US2016/0096892A1, US2014/0322275A1, or WO2015/090230, incorporated herein by reference), and/or one, two, three (e.g., all three) light chain CDRs, LC CDR1, LC CDR2 and LC CDR3, from an antibody described herein (e.g., an antibody described in WO2015/142675, US-2015-0283178-A1, US-2016-0046724-A1, US2014/0322212A1, US2016/0068601A1, US2016/0051651A1, US2016/0096892A1, US2014/0322275A1, or WO2015/090230, incorporated herein by reference). In one embodiment, the antigen binding domain comprises a heavy chain variable region and/or a variable light chain region of an antibody listed above.

[1280] In embodiments, the antigen binding domain is an antigen binding domain described in WO2015/142675, US-2015-0283178-A1, US-2016-0046724-A1, US2014/0322212A1, US2016/0068601A1, US2016/0051651A1, US2016/0096892A1, US2014/0322275A1, or WO2015/090230, incorporated herein by reference.

[1281] In embodiments, the antigen binding domain targets BCMA and is described in US-2016-0046724-A1.

[1282] In embodiments, the antigen binding domain targets CD19 and is described in US-2015-0283178-A1.

[1283] In embodiments, the antigen binding domain targets CD123 and is described in US2014/0322212A1, US2016/0068601A1.

[1284] In embodiments, the antigen binding domain targets CLL and is described in US2016/0051651A1.

[1285] In embodiments, the antigen binding domain targets CD33 and is described in US2016/0096892A1.

[1286] Exemplary target antigens that can be targeted using the CAR-expressing cells, include, but are not limited to, CD19, CD123, EGFRvIII, CD33, mesothelin, BCMA, and GFR ALPHA-4, among others, as described in, for example, WO2014/153270, WO 2014/130635, WO2016/028896, WO 2014/130657, WO2016/014576, WO 2015/090230, WO2016/014565, WO2016/014535, and WO2016/025880, each of which is herein incorporated by reference in its entirety.

[1287] In other embodiments, the CAR-expressing cells can specifically bind to humanized CD19, e.g., can include a CAR molecule, or an antigen binding domain (e.g., a humanized antigen binding domain) according to Table 3 of WO2014/153270, incorporated herein by reference. The amino acid and nucleotide sequences encoding the CD19 CAR molecules and antigen binding domains (e.g., including one, two, three VH CDRs; and one, two, three VL CDRs according to Kabat or Chothia), are specified in WO2014/153270.

[1288] In other embodiments, the CAR-expressing cells can specifically bind to CD123, e.g., can include a CAR molecule (e.g., any of the CAR1 to CAR8), or an antigen binding domain according to Tables 1-2 of WO 2014/130635, incorporated herein by reference. The amino acid and nucleotide sequences encoding the CD123 CAR molecules and antigen binding domains (e.g., including one, two, three VH CDRs; and one, two, three VL CDRs according to Kabat or Chothia), are specified in WO 2014/130635.

[1289] In other embodiments, the CAR-expressing cells can specifically bind to CD123, e.g., can include a CAR molecule (e.g., any of the CAR123-1 ro CAR123-4 and hzCAR123-1 to hzCAR123-32), or an antigen binding domain according to Tables 2, 6, and 9 of WO2016/028896, incorporated herein by reference. The amino acid and nucleotide sequences encoding the CD123 CAR molecules and antigen binding domains (e.g., including one, two, three VH CDRs; and one, two, three VL CDRs according to Kabat or Chothia), are specified in WO2016/028896.

[1290] In other embodiments, the CAR-expressing cells can specifically bind to EGFRvIII, e.g., can include a CAR molecule, or an antigen binding domain according to Table 2 or SEQ ID NO:11 of WO 2014/130657, incorporated herein by reference. The amino acid and nucleotide sequences encoding the EGFRvIII CAR molecules and antigen binding domains (e.g., including one, two, three VH CDRs; and one, two, three VL CDRs according to Kabat or Chothia), are specified in WO 2014/130657.

[1291] In other embodiments, the CAR-expressing cells can specifically bind to CD33, e.g., can include a CAR molecule (e.g., any of CAR33-1 to CAR-33-9), or an antigen binding domain according to Table 2 or 9 of WO2016/014576, incorporated herein by reference. The amino acid and nucleotide sequences encoding the CD33 CAR molecules and antigen binding domains (e.g., including one, two, three VH CDRs; and one, two, three VL CDRs according to Kabat or Chothia), are specified in WO2016/014576.

[1292] In other embodiments, the CAR-expressing cells can specifically bind to mesothelin, e.g., can include a CAR molecule, or an antigen binding domain according to Tables 2-3 of WO 2015/090230, incorporated herein by reference. The amino acid and nucleotide sequences encoding the mesothelin CAR molecules and antigen binding domains (e.g., including one, two, three VH CDRs; and one, two, three VL CDRs according to Kabat or Chothia), are specified in WO 2015/090230.

[1293] In other embodiments, the CAR-expressing cells can specifically bind to BCMA, e.g., can include a CAR molecule, or an antigen binding domain according to Table 1 or 16, SEQ ID NO: 271 or SEQ ID NO: 273 of WO2016/014565, incorporated herein by reference. The amino acid and nucleotide sequences encoding the BCMA CAR molecules and antigen binding domains (e.g., including one, two, three VH CDRs; and one, two, three VL CDRs according to Kabat or Chothia), are specified in WO2016/014565.

[1294] In other embodiments, the CAR-expressing cells can specifically bind to CLL-1, e.g., can include a CAR molecule, or an antigen binding domain according to Table 2 of WO2016/014535, incorporated herein by reference. The amino acid and nucleotide sequences encoding the CLL-1 CAR molecules and antigen binding domains (e.g., including one, two, three VH CDRs; and one, two, three VL CDRs according to Kabat or Chothia), are specified in WO2016/014535.

[1295] In other embodiments, the CAR-expressing cells can specifically bind to GFR ALPHA-4, e.g., can include a CAR molecule, or an antigen binding domain according to Table 2 of WO2016/025880, incorporated herein by reference. The amino acid and nucleotide sequences encoding the GFR ALPHA-4 CAR molecules and antigen binding domains (e.g., including one, two, three VH CDRs; and one, two, three VL CDRs according to Kabat or Chothia), are specified in WO2016/025880.

[1296] In one embodiment, the antigen binding domain of any of the CAR molecules described herein (e.g., any of CD19, CD123, EGFRvIII, CD33, mesothelin, BCMA, and GFR ALPHA-4) comprises one, two three (e.g., all three) heavy chain CDRs, HC CDR1, HC CDR2 and HC CDR3, from an antibody listed above, and/or one, two, three (e.g., all three) light chain CDRs, LC CDR1, LC CDR2 and LC CDR3, from an antigen binding domain listed above. In one embodiment, the antigen binding domain comprises a heavy chain variable region and/or a variable light chain region of an antibody listed or described above.

### CRS Therapies

[1297] Therapies for CRS include IL-6 inhibitor or IL-6 receptor (IL-6R) inhibitors (e.g., tocilizumab or siltuximab), bazedoxifene, sgp130 blockers, vasoactive medications, corticosteroids, immunosuppressive agents, and mechanical ventilation. Exemplary therapies for CRS are described in International Application WO2014011984, which is hereby incorporated by reference.

[1298] Tocilizumab is a humanized, immunoglobulin G1kappa anti-human IL-6R monoclonal antibody. See, e.g., id. Tocilizumab blocks binding of IL-6 to soluble and membrane bound IL-6 receptors (IL-6Rs) and thus inhibitos classical and trans-IL-6 signaling. In embodiments, tocilizumab is administered at a dose of about 4-12 mg/kg, e.g., about 4-8 mg/kg for adults and about 8-12 mg/kg for pediatric subjects, e.g., administered over the course of 1 hour.

[1299] In some embodiments, the CRS therapeutic is an inhibitor of IL-6 signalling, e.g., an inhibitor of IL-6 or IL-6 receptor. In one embodiment, the inhibitor is an anti-IL-6 antibody, e.g., an anti-IL-6 chimeric monoclonal antibody such as siltuximab. In other embodiments, the inhibitor comprises a soluble gpl30 (sgp130) or a fragment thereof that is capable of blocking IL-6 signalling. In some embodiments, the sgp130 or fragment thereof is fused to a heterologous domain, e.g., an Fc domain, e.g., is a gpl30-Fc fusion protein such as FE301. In embodiments, the inhibitor of IL-6 signalling comprises an antibody, e.g., an antibody to the IL-6 receptor, such as sarilumab, olokizumab (CDP6038), elsilimomab, sirukumab (CNTO 136), ALD518/BMS-945429, ARGX-109, or FM101. In some embodiments, the inhibitor of IL-6 signalling comprises a small molecule such as CPSI-2364.

[1300] Exemplary vasoactive medications include but are not limited to angiotensin-11, endothelin-1, alpha adrenergic agonists, rostanoids, phosphodiesterase inhibitors, endothelin antagonists, inotropes (e.g., adrenaline, dobutamine, isoprenaline, ephedrine), vasopressors (e.g., noradrenaline, vasopressin, metaraminol, vasopressin, methylene blue), inodilators (e.g., milrinone, levosimendan), and dopamine.

[1301] Exemplary vasopressors include but are not limited to norepinephrine, dopamine, phenylephrine, epinephrine, and vasopressin. In some embodiments, a high-dose vasopressor includes one or more of the following: norpepinephrine monotherapy at >20 ug/min, dopamine monotherapy at >10 ug/kg/min, phenylephrine monotherapy at >200 ug/min, and/or epinephrine monotherapy at >10 ug/min. In some embodiments, if the subject is on vasopressin, a high-dose vasopressor includes vasopressin+ norepinephrine equivalent of >10 ug/min, where the norepinephrine equivalent dose=[norepinephrine (ug/min)]+[dopamine (ug/kg/min)/2]+[epinephrine (ug/min)]+[phenylephrine (ug/min)/10]. In some embodiments, if the subject is on combination vasopressors (not vasopressin), a high-dose vasopressor includes norepinephrine equivalent of >20 ug/min, where the norepinephrine equivalent dose=[norepinephrine (ug/min)]+[dopamine (ug/kg/min)/2]+[epinephrine (ug/min)]+[phenylephrine (ug/min)/10]. See e.g., Id.

[1302] In some embodiments, a low-dose vasopressor is a vasopressor administered at a dose less than one or more of the doses listed above for high-dose vasopressors.

[1303] Exemplary corticosteroids include but are not limited to dexamethasone, hydrocortisone, and methylprednisolone. In embodiments, a dose of dexamethasone of 0.5 mg/kg is used. In embodiments, a maximum dose of dexamethasone of 10 mg/dose is used. In embodiments, a dose of methylprednisolone of 2 mg/kg/day is used.

[1304] Exemplary immunosuppressive agents include but are not limited to an inhibitor of TNFα or an inhibitor of IL-1. In embodiments, an inhibitor of TNFα comprises an anti-TNFα antibody, e.g., monoclonal antibody, e.g., infliximab. In embodiments, an inhibitor of TNFα comprises a soluble TNFα receptor (e.g., etanercept). In embodiments, an IL-1 or IL-1R inhibitor comprises anakinra.

[1305] In some embodiments, the subject at risk of developing severe CRS is administered an anti-IFN-gamma or anti-sIL2Ra therapy, e.g., an antibody molecule directed against IFN-gamma or sIL2Ra.

[1306] In embodiments, a subject who has CRS or is at risk of developing CRS is treated with a fever reducing medication such as acetaminophen.

[1307] In embodiments, a subject herein is administered or provided one or more therapies for CRS described herein, e.g., one or more of IL-6 inhibitors or IL-6 receptor (IL-6R) inhibitors (e.g., tocilizumab), vasoactive medications, corticosteroids, immunosuppressive agents, or mechanical ventilation, in any combination, e.g., in combination with a CAR-expressing cell described herein.

[1308] In embodiments, a subject is administered one or more therapies for CRS described herein, e.g., one or more of IL-6 inhibitor or IL-6 receptor (IL-6R) inhibitors (e.g., tocilizumab), vasoactive medications, corticosteroids, immunosuppressive agents, or mechanical ventilation, in any combination, e.g., in combination with a CAR-expressing cell described herein.

[1309] In embodiments, a subject herein is transferred to an intensive care unit. In some embodiments, a subject herein is monitored for one ore more symptoms or conditions associated with CRS, such as fever, elevated heart rate, coagulopathy, MODS (multiple organ dysfunction syndrome), cardiovascular dysfunction, distributive shock, cardiomyopathy, hepatic dysfunction, renal dysfunction, encephalopathy, clinical seizures, respiratory failure, or tachycardia. In some embodiments, the methods herein comprise administering a therapy for one of the symptoms or conditions associated with CRS. For instance, in embodiments, e.g., if the subject develops coagulopathy, the method comprises administering cryoprecipitate. In some embodiments, e.g., if the subject develops cardiovascular dysfunction, the method comprises administering vasoactive infusion support. In some embodiments, e.g., if the subject develops distributive shock, the method comprises administering alpha-agonist therapy. In some embodiments, e.g., if the subject develops cardiomyopathy, the method comprises administering milrinone therapy. In some embodiments, e.g., if the subject develops respiratory failure, the method comprises performing mechanical ventilation (e.g., invasive mechanical ventilation or noninvasive mechanical ventilation). In some embodiments, e.g., if the subject develops shock, the method comprises administering crystalloid and/or colloid fluids.

[1310] In embodiments, the CAR-expressing cell is administered prior to, concurrently with, or subsequent to administration of one or more therapies for CRS described herein, e.g., one or more of IL-6 inhibitor or IL-6 receptor (IL-6R) inhibitors (e.g., tocilizumab), vasoactive medications, corticosteroids, immunosuppressive agents, or mechanical ventilation. In embodiments, the CAR-expressing cell is administered within 2 weeks (e.g., within 2 or 1 week, or within 14 days, e.g., within 14, 13, 12, 11, 10, 9, 8, 7, 6, 5, 4, 3, 2, 1 day or less) of administration of one or more therapies for CRS described herein, e.g., one or more of IL-6 inhibitors or IL-6 receptor (IL-6R) inhibitors (e.g., tocilizumab), vasoactive medications, corticosteroids, immunosuppressive agents, or mechanical ventilation. In embodiments, the CAR-expressing cell is administered at least 1 day (e.g., at least 1, 2, 3, 4, 5, 6, 7, 8, 9, 10, 11, 12, 13, 14, 15, 16, 17, 18, 19, 20, 1, week, 2 weeks, 3 weeks, 4 weeks, 1 month, 2 months, 3 months, 3 months, or more) before or after administration of one or more therapies for CRS described herein, e.g., one or more of IL-6 inhibitors or IL-6 receptor (IL-6R) inhibitors (e.g., tocilizumab), vasoactive medications, corticosteroids, immunosuppressive agents, or mechanical ventilation.

[1311] In embodiments, a subject herein is administered a single dose of an IL-6 inhibitor or IL-6 receptor (IL-6R) inhibitor (e.g., tocilizumab). In embodiments, the subject is administered a plurality of doses (e.g., 2, 3, 4, 5, 6, or more doses) of an IL-6 inhibitor or IL-6 receptor (IL-6R) inhibitor (e.g., tocilizumab).

[1312] In embodiments, CRS is graded according to Table 28B:

TABLE 28B
CRS grading

| | |
|---|---|
| Gr1 | Supportive care only |
| Gr2 | IV therapies +/− hospitalization. |
| Gr3 | Hypotension requiring IV fluids or low-dose |
| | vasoactives or hypoxemia requiring oxygen, |
| | CPAP, or BIPAP. |
| Gr4 | Hypotension requiring high-dose vasoactives |
| | or hypoxemia requiring mechanical ventilation. |
| Gr 5 | Death |

### EXAMPLES

[1313] The invention is further described in detail by reference to the following experimental examples. These examples are provided for purposes of illustration only, and are not intended to be limiting unless otherwise specified. Thus, the invention should in no way be construed as being limited to the following examples, but rather, should be construed to encompass any and all variations which become evident as a result of the teaching provided herein.

[1314] Without further description, it is believed that one of ordinary skill in the art can, using the preceding description and the following illustrative examples, make and utilize the compounds of the present invention and practice the claimed methods. The following working examples specifically point out various aspects of the present invention, and are not to be construed as limiting in any way the remainder of the disclosure.

### Example 1: Dosage Regimen for Chimeric Antigen Receptor (CAR) T Cell Therapy for Adult Patients with Relapsed or Refractory (r/r) Acute Lymphoblastic Leukemia (ALL)

[1315] Genetically modified T cells expressing an anti-CD19 CAR result in response rates of 90% in adults with r/r CD19+ ALL. Cytokine release syndrome (CRS) is the most significant treatment-related toxicity and usually responds to anti-cytokine therapy. This example reports outcomes from 30 adults with r/r ALL.

[1316] Inclusion criteria for the study included that the patients had CD19+ relapsed or refractory ALL (e.g., Primary Refractory, wherein patients failed>2 lines of upfront treatment, or Relapsed ALL, wherein patients had a 1st or greater relapse); and >5% BM Blasts. Patient characteristics are described below in Table 34:

| Patient Characteristics | N = 30 | |
|---|---|---|
| Median Age (range) | 44 | (21, 72) |
| Post Allogenic Transplant | 10 | (33%) |
| Post Blinatumomab | 10 | (33%) |
| Ph+ | 3 | (10%) |
| Baseline ALL burden | | |
| >5% Blasts | 90% | |
| 0.01-5% Blasts | 3 | (10%) |

| | |
|---|---|
| <0.01% Blasts | 0 |

[1317] Autologous T cells were transduced with a lentiviral vector encoding a murine anti-CD19 scFv/4-1BB/CD3((CTL019) CAR. Adults with r/r CD19+ ALL received CTL019 on one of 2 trials (NCT02030847; NCT01029366). All patients received lymphodepletion followed by CTL019 as a 1-time infusion or fractionated infusions over 3 days (10%:D1, 30%:D2 and 60%:D3). Total planned CTL019 dose varied (5×10⁷-5×10⁸) with protocol modifications for CRS toxicity. Bone marrow baseline assessment was performed on Day-1 before CTL019 treatment, with a response assessment at day 28, with follow-up assessments at 3, 6, 9, and 12 months.

[1318] 30 patients (median age 44 (range 21-72)); received CTL019 via 4 dosing cohorts (Table 35). 10 patients had prior blinatumomab and 10 had prior allogeneic SCT. 9 patients were treated with 5×10⁷ CTL019 cells with either a 1-time dose (n=3) or fractionated dosing (n=6). 6/9 patients had Grade 3-4 CRS managed with tocilizumab and 3 patients achieved a CR (33%). 6 patients were treated with a 1-time CTL019 dose of 5×10⁸. 3/6 patients died with CRS refractory to tocilizumab and corticosteroids. These 3 patients also had concurrent culture positive sepsis. The other 3 patients achieved CR. 15 patients were treated with a planned CTL019 dose of 5×10⁸ administered via fractionated dosing. If early CRS was noted, subsequent infusions of CTL019 were held allowing for intra-patient dose modification. Anti-cytokine treatment was initiated at Grade 3 CRS. A subset of the patients had manageable Grade 3-4 CRS with an ORR rate of 83%, including at least 9 complete responses.

TABLE 35

| | | | | | | |
|---|---|---|---|---|---|---|
| | CTL019 | | | CRS ≥ | CRS | Response |
| Cohort | Dose | Schedule | N | Gr3 | Gr5 | (Evaluable) |

Outcome (by Cohort)

| | | | | | | | |
|---|---|---|---|---|---|---|---|
| High Dose | 5 × 10⁸ | Split | 15 | 66% | 0 | 86% | (0 TRM) |
| Split | | | | | | | |
| High Dose | 5 × 10⁸ | Single | 6 | 100% | 3 | 100% | (3 TRM) |
| Single | | | | | | | |

| | | | | | | |
|---|---|---|---|---|---|---|
| Low Dose | 5 × 10⁷ | Single(3) | 9 | 66% | 0 | 33% |
| | | Split(6) | | | | |

Outcome (Total)

| | | | | | | | |
|---|---|---|---|---|---|---|---|
| Total (1-4) | 5 × 10⁷- | Single(9) | 30 | 75% | 3 | 72% | (3TRM) |
| | 5 × 10⁸ | Split(21) | | | | | |

[1319] Neurologic toxicity was also examined, and no clear dose to neuro-toxicity relationship was observed. All events (encephaly/delirium and seizure) were self-limited with return to baseline by Day 28.

[1320] Higher doses of CTL019 may be more effective and split dosing may improve safety allowing for intra-patient dose modification without compromising efficacy in adult patients with r/r ALL. There is a high risk of fatal outcome with concurrent sepsis and CRS, and measures to prevent infection and intervene early for CRS are warranted. This study also supports the use of inverse dosing based on disease burden. Furthermore, the study supports the use of cytokine therapy, e.g., as prophylactic or pre-emptive therapy.

[1321] According to the non-limiting theory herein, higher disease burden can increase the risk of severe CRS. Higher doses of CART cells can improve efficacy, but can also increase the risk of severe CRS. Administering CART cells in a fractionated manner as described herein can reduce the risk of severe CRS, while maintaining efficacy.

### Example 2: Efficacy and Safety of CTL019 in the First US Phase II Multicenter Trial in Pediatric Relapsed/Refractory Acute Lymphoblastic Leukemia: Results of an Interim Analysis

[1322] Background: CTL019 is an investigational therapy derived from autologous T-cells expressing a CD19-specific chimeric antigen receptor (CAR). A single center, phase I/IIa trial of CTL019 showed complete and durable remissions in pediatric/young adult patients (pts) with relapsed/refractory (R/R) B-cell acute lymphoblastic leukemia (B-ALL) (Maude et al NEJM 2014); these results have yet to be reproduced in a multicenter setting. This study reports results from a 6-month interim analysis of the first multicenter phase II trial of an engineered cell therapy in leukemia.

[1323] Methods: 9 US sites participated in this single-arm phase II study in pediatric/young adult pts with R/R B-ALL. Leukapheresis products were shipped for centralized manufacturing. T cells were transduced with a lentiviral vector encoding a CAR composed of anti-CD19 scFv, CD3(and 4-1BB domains. Following lymphodepletion with fludarabine and cyclophosphamide, a single dose of CTL019 cells was administered (target dose 2.0-5.0×10⁶ cells/kg for <50 kg and 1.0-2.5×10⁸ cells for >50 kg). The primary endpoint was overall remission rate (ORR=CR+ CRi [CRi, complete remission with incomplete blood count recovery] maintained at 2 evaluations ≥28 days apart) as determined by an Independent Review Committee. Secondary objectives included minimal residual disease (MRD), relapse-free survival (RFS), overall survival (OS) and safety. All analyses were performed on infused patient set.

[1324] Results: 29/35 pts enrolled (82.9%) were infused with CTL019; 6 withdrew prior to infusion (2 manufacturing failures [1 lack of growth, 1 contamination]; 4 deaths [median, 48 days from enrollment; 2 progressive disease, 1 multi-organ failure, 1 pneumonia]). Mean bone marrow involvement at enrollment was 68.2% (SD, 27.3%; Table 36). 2 pts did not receive lymphodepleting chemotherapy due to leukopenia. Collection, manufacturing and infusion were feasible in a multicenter setting with a median time from enrollment to infusion of 37 days. Target cell dose was met in 24/33 (72.7%) manufactured products. ORR in all infused pts was 69.0% (20/29 pts; 98.95% CI 43.6, 88.1). Of the 5 pts who received CTL019 below the target dose, 2 achieved CR/CRi. Of note, deep remission with no evidence of MRD (<0.01%) was achieved in 18/29 pts (62.1%; 95% CI 42.3, 79.3) within 6 months. Median RFS and median survival have not yet been reached. Median duration of follow-up was 6.4 months (range 0.4-14.0). CR/CRi was not achieved in 9 pts: 2 pts died before Day 28 (1 ALL; 1 embolic stroke not attributed to CTL019 at Day 25 after infusion), 6 did not respond and 1 pt achieved CRi at Day 28 but relapsed 17 days later. Of the 20 pts who achieved a CR/CRi, 8 pts relapsed 1.7-7.6 months after onset of remission; 2 were CD19 negative. RFS and OS at 6 months (FIGS. 1A and 1B) were 66.4% and 75.7%, respectively. Serious adverse events occurred in 79.3% of pts within 8 weeks of infusion. Overall 10 deaths occurred at 0.4-8.8 months (9 ALL; 1 embolic stroke); no deaths attributable to CTL019. The most common adverse event was cytokine release syndrome (CRS), which was graded on the Penn scale and managed according to a standardized algorithm. All 26 (89.7%) cases of CRS were reversible; 11 pts (37.9%) had grade 3 or 4 CRS, of which 7 (26.9%) required systemic anti-cytokine therapy, 9 (34.6%) required high dose vasopressors for hypotension, 6 (23.1%) required mechanical ventilation, 4 (15.4%) underwent dialysis. Reversible neuropsychiatric events occurred in 9 (31%) pts (1 grade 3; no grade 4), including seizures in 2 pts but no cases of cerebral edema.

[1325] Conclusions: In this first multicenter trial of CAR-modified T cell therapy, CTL019 therapy was feasible and efficacious, showing a high ORR with durable remissions in pediatric/young adult pts with R/R B-ALL. Despite the high rate of toxicity with CTL019 in the R/R setting, the rate of grade 3 or 4 CRS was comparable to the single center study, and standardized management of CRS was successful in a multicenter trial with no deaths attributable to CRS. In this highly refractory population, a vast majority of eligible pts can be successfully infused in a timely fashion and outcomes appear reproducible in a multicenter setting despite a more heterogeneous population than the single center study.

TABLE 36
Demographics and baseline characterstics.

| Patient Characteristics | All patients (N = 29) | |
|---|---|---|
| Age (years); median (range) | 12 | (3-25) |
| Age at initial diagnosis (years); median (range) | 7 | (1-19) |
| Age <10 years at initial diagnosis; n (%) | 17 | (58.6) |
| Prior Hematopoietic Stem Cell Transplant; n (%) | | |
| 0 | 12 | (41.4) |
| 1 | 15 | (51.7) |
| 2 | 2 | (6.9) |
| Disease status; n (%) | | |
| Primary refractory | 2 | (6.9) |
| Chemo-refractory | 2 | (6.9) |
| Relapsed disease | 25 | (86.2) |
| Number of previous therapies; median (range) | 3 | (1-9) |
| Time since initial diagnosis to first relapse (months); median | 26 | (9-108) |
| (range) | | |
| Bone marrow blast count at enrollment (%); mean (SD) | 68.2 | (27.3) |
| CNS status classification at enrollment; n (%) | | |
| CNS 1 | 26 | (89.7) |
| CNS 2 | 3 | (10.3) |

Abbreviations:
CNS, central nervous system,
n, number of patients;
SD, standard deviation

### Example 3: Posterior Reversible Encephalopathy Syndrome (PRES) after Infusion of Anti-BCMA CAR T Cells (CART-BCMA) for Multiple Myeloma: Successful Treatment with Cyclophosphamide

[1326] Neurologic toxicity has been observed in patients treated with anti-CD19 chimeric antigen receptor (CAR) T cells and the anti-CD19/anti-CD3 bispecific T-cell engager blinatumomab. Reported neurotoxicities include both focal deficits (e.g., cranial nerve palsy or hemiparesis) and global abnormalities (e.g., generalized seizures, confusion), often associated with systemic cytokine release syndrome (CRS) but also observed after recovery from or in absence of CRS. CART-BCMA involves ex-vivo-expanded autologous T cells transduced via lentiviral vector to express a 4-1BB/CD3-zeta-based CAR specific for B Cell Maturation Antigen. This Example reports clinical characteristics and management of a severe neurotoxicity observed during a phase 1 study of CART-BCMA in multiple myeloma (MM) (NCT02546167).

[1327] The subject is a 55-year-old female with high-risk IgA lambda MM progressing after 4 prior lines of therapy. Pre-treatment disease manifestations included cytopenias and extramedullary plasmacytomas of the pleura and paravertebral musculature. Bone marrow (BM) was >95% occupied by BCMA+ plasma cells. Pre-treatment brain MRI showed pachymeningeal thickening and enhancement over the left cerebral convexity, possibly due to direct extension of calvarial MM lesions. Pre-treatment examination by a neurologist and CSF cytology showed no evidence of CNS MM.

[1328] The subject received 2×10⁸ CART-BCMA cells, 40% of the planned dose, over two consecutive days, without preceding lymphodepleting chemotherapy; a third planned infusion was held due to fevers. Over the next 4 days, fevers persisted, and hypoxia, pancytopenia and delirium developed. Brain MRI and lumbar puncture on day 4 showed no new abnormalities. Evaluation for infection was negative. These symptoms corresponded with rise in serum IL-6 and other CRS-associated biomarkers. On day 6 after CART-BCMA infusion, two tocilizumab doses were administered for CRS, which led to decline in serum IL-6 and resolution of fevers and hypoxia (FIG. 2, circles and triangles).

[1329] On day 8, the subject became obtunded, prompting intubation and initiation of corticosteroids (methylprednisolone 1000 mg xl, then hydrocortisone 100 mg every 8 hours). Her mental status improved over the subsequent two days, and by day 11 she was extubated, alert, and off steroids. On day 12 she developed a generalized seizure and was again intubated for airway protection and treated with antiepileptic drugs (AED). She again improved and was extubated but, on day 15, developed status epilepticus that required five AEDs to control. Repeat brain MRI showed new diffuse sulcal, cortical, and subcortical T2/FLAIR signal abnormality involving the bilateral frontal, parietal, occipital, posterior temporal, and cerebellar hemispheres, with sulcal effacement concerning for cerebral edema. This deterioration was not associated with recurrence of fevers, other systemic CRS signs/symptoms, or hypertension, but it coincided with striking rise in frequency of circulating, activated (HLA-DR+) CART-BCMA cells (FIG. 2, inverted triangles). Serum levels of CRS-related cytokines continued to decrease, but CSF obtained on day 16 showed marked elevation in IL-6, IL-8, and other CRS-associated cytokines compared to both day-16 serum and day-4 CSF (FIG. 2, squares). CART-BCMA cells were detected in CSF. High-dose methylprednisolone was restarted on day 15 without clinical improvement. On day 17, cyclophosphamide 1.5 g/m² was administered to reduce CART-BCMA cells. Beginning on day 18, alertness and responsiveness improved substantially, and she was extubated on day 20. Corticosteroids were gradually tapered. MRI on day 23 showed near-resolution of cerebral and cerebellar signal abnormalities, which were completely gone on repeat MRI 4 weeks later. Cognitive functioning recovered without long-term neurologic sequelae other than fatigue and mild concentration difficulty attributed to effects of AEDs. The last neurologic symptom to recover was mild difficulty processing visual information. Despite administration of cyclphosphamide and a prolonged corticosteroid course, CART-BCMA cells remained detectable in both blood and marrow at last evaluation, 164 days after infusion, and patient achieved a VGPR lasting 5 months.

[1330] Given the rapid reversibility and MRI appearance, this neurologic syndrome was felt to be most consistent with posterior reversible leukoencephalopathy syndrome (PRES), possibly due to high levels of CRS-related cytokines in CSF, as opposed to encephalitis from direct CART-BCMA cytotoxicity against neuronal tissue. PRES developed amidst improvement in systemic CRS, suggesting a CNS-localized CRS, which may have been due to occult CNS MM encountered by rising CART-BCMA frequency and/or failure of tocilizumab to block IL-6 receptor in the CNS. While steroids achieved only transient clinical improvement, the syndrome resolved rapidly after cytoreduction with cyclophosphamide, without completely eradicating infused CART-BCMA cells, suggesting that this strategy could be considered for cases of life-threatening CAR T cell neurotoxicity.

### Example 4: Treatment with Chimeric Antigen Receptor Modified T Cells Directed Against CD19 (CTL019) Results in Durable Remissions in Patients with Relapsed or Refractory Diffuse Large B Cell Lymphomas of Germinal Center and Non-Germinal Center Origin, “Double Hit” Diffuse Large B Cell Lymphomas, and Transformed Follicular to Diffuse Large B Cell Lymphomas

[1331] BACKGROUND: The cell of origin (COO) of diffuse large B cell lymphoma (DLBCL), germinal center (GC) or non-germinal center (NGC), may have prognostic significance for treatment outcome in first-line and relapsed settings (Lenz et al NEJM 2008; Thieblemont et al JCO 2011). “Double hit” DLBCL (DHL), defined by chromosomal breakpoints affecting the MYC/8q24 locus and a second oncogene locus and arising either from transformation of follicular lymphoma (FL) or de novo, has no effective therapy in the relapsed setting. Since new therapies are needed for poor prognostic groups of relapsed DLBCL patients (pts), we examined the efficacy of treatment with autologous T cells genetically modified to express a chimeric antigen receptor consisting of an external anti-CD19 single chain murine antibody domain with CD3(and 4-1BB signaling domains (CTL019 cells) in pts with relapsed or refractory GC- and NGC-DLBCL, DHL, and transformed FL as part of an ongoing phase IIa clinical trial (NCT02030834).

[1332] METHODS: Eligible pts had CD19+ DLBCL with measurable residual disease after primary and salvage therapies, were not eligible for autologous stem cell transplant (ASCT) or had relapsed/residual disease after ASCT, had a limited prognosis (<2 years anticipated survival), and had responsive or stable disease with most recent therapy. COO of DLBCL was determined by immunohistochemistry using Hans' algorithm (Hans et al Blood 2004). Fluorescence in-situ hybridization was performed on diagnostic tissue using Vysis MYC (8q24), BCL2 (18q21) and BCL6 (3q27) break apart probes to determine DHL. DHL was defined by a MYC locus chromosomal translocation with a second translocation involving either BCL2 or BCL6. After steady state apheresis to collect peripheral blood leukocytes, pts received lymphodepleting chemotherapy based on clinical features and past therapies. One to 4 days after chemotherapy, pts received a single intravenous dose of CTL019 cells. Following CTL019 cells, pts received no further therapy. Initial tumor response assessment was performed 3 months after T cell infusion using International Working Group response criteria. Enrollment started in February 2014; data are reported through Jul. 24, 2016.

[1333] RESULTS: 13 pts with DLBCL are enrolled and evaluable for response (7 pts GC, 5 pts NGC, 1 undetermined). The median age is 59 years (range: 25-77), male:female ratio 10:3, median number of prior therapies 5 (range: 2-8), and number of pts with prior transplant 7 (54%). At enrollment, Ann Arbor stages were: Stage IV 8 pts (61%), Stage III 1 pt (8%), and Stage II 3 pts (23%) Stage IE 1 pt (8%); 3 pts (23%) had bone marrow involvement. LDH was increased in 8 pts (62%). ECOG PS was 0 in 4 pts (31%) and 1 in 9 pts (69%). Lymphodepleting chemotherapy regimens were bendamustine (90 mg/m²×2; 1 pt), cyclophosphamide (1 gm/m²; 2 pts), radiation-cyclophosphamide (4,000cGy-750 mg/m²; 1 pt), modified-EPOCH (3 pts), and hyper-fractionated cyclophosphamide (300 mg/m² q12 hours×6; 6 pts). 12 pts received 5.00E+08 (5.10-6.75E+06 cells/kg) CTL019 cells; 1 pt received 1.93E+08 (3.10E+06 cells/kg). Median peak CTL019 cell expansion in blood occurred 7 days after infusion (range: 2-28 days); there is no difference in peak expansion between responders and non-responders or pts with GC- or NGC-DLBCL. Cytokine release syndrome occurred in 9 pts (8 grade 2; 1 grade 3) and did not predict response. Transient neurotoxicity included delirium in 2/13 pts (1 grade 2; 1 grade 3) and cognitive disturbance in 1/13 pts (1 grade 1). At 3 months post CTL019 infusion, overall response rate (ORR) is 52% (7/13 pts); ORR for GC 71% (5/7 pts) and NGC 40% (2/5 pts). Complete response rate (CR) at 3 months is 38% (5/13 pts); CR for GC 43% (3/7 pts) and NGC 40% (2/5 pts). Best response for all pts is CR in 6 of 13 pts (46%); CR for GC 57% (4/7 pts) and NGC 40% (2/5 pts). 3 of 7 pts with GC-DLBCL had transformed FL and all 3 achieved CR; 2 of 7 pts with GC-DLBCL had DHL and both achieved CR. To date, no pt achieving CR has relapsed. 2 of 5 pts with NGC-DLBCL had T-cell rich DLBCL; neither patient responded to CTL019. Median progression-free survival (PFS) is 5.8 months (mo) for all pts, 3.0 mo for NGC pts, and not reached for GC pts (PFS 57.1% [95% CI: 17.2%-83.7%] at median follow up 21.9 mo).

[1334] CONCLUSIONS: These results indicate that a single treatment with CTL019 cells is safe and efficacious in relapsed or refractory GC- and NGC-DLBCL, DHL, and transformed FL.

### Example 5: Soluble BCMA in Peripheral Blood Serum is a Useful Minimal Residual Disease Biomarker for Monitoring Patients with Multiple Myeloma, Chronic Lymphocytic Leukemia and Other B Cell Malignancies Following Treatment with CAR-BCMA or CAR-19

[1335] B cell maturation antigen (BCMA) (BCMA) is expressed on the surface of plasma cells, the final differentiation stage of B cells, and usually on multiple myeloma cells. Soluble BCMA (sBCMA) is readily detectable by immunoassay methods in serum or plasma from normal subjects and in patients with certain B cell malignancies. In multiple myeloma (MM), a plasma cell malignancy localized selectively to the bone marrow, serum sBCMA levels can be greatly elevated compared to the normal range in healthy subjects before treatment. Chimeric antigen receptor cell therapy targeting BCMA have been developed for treating MM patients. This Example uses ELISA to examine serum samples from MM patients before and after CAR-BCMA therapy on clinical trial UPCC14415 and shown that serum sBCMA is greatly reduced in patients experiencing CAR-BCMA expansion and persistence after infusion, and returns if the patients subsequently lose CAR-BCMA cells and undergo clinical relapse. Thus sBCMA is an excellent and convenient minimal residual disease (MRD) biomarker for CAR-BCMA efficacy in MM.

[1336] In addition, these experiments test sera from MM patients who received chimeric antigen receptor cell therapy targeting CD19 (CAR19) therapy on trial UPCCO02413. It was found that CAR19 expansion post infusion was also associated with sBCMA reduction, and that loss of CAR19 and clinical relapse was accompanied by a rise in sBCMA levels. This is a logical correlation given that precursors to plasma cells express CD19, even though plasma cells themselves do not express CD19. sBCMA levels were then examined in serum samples from patients with other B cell malignancies including chronic lymphocytic leukemia (CLL), acute lymphoblastic leukemia (ALL) and non-Hodgkins lymphoma (NHL) and who were treated with CAR19 therapy. Preliminary data suggests that sBCMA levels are elevated in some CLL patients and decrease following effective CAR19 therapy, suggesting that sBCMA may be a useful MRD biomarker for evaluating efficacy of CD19 therapy in other B cell malignancies.

### INTRODUCTION

[1337] B-cell maturation antigen (BCMA), also known as tumor necrosis factor receptor superfamily member 17 (TNFRSF17), is a protein that in humans is encoded by the TNFRSF17 gene. This receptor is preferentially expressed in mature B lymphocytes, and may be important for B cell development and autoimmune response. BCMA has been shown to specifically bind to the tumor necrosis factor (ligand) superfamily, member 13b (TNFSF13B/TALL-1/BAFF), and to lead to NF-kappaB and MAPK8/JNK activation. This receptor also binds to various TRAF family members, and thus may transduce signals for cell survival and proliferation. BCMA is expressed on some activated B cells and Ig-secreting cells; it binds both BAFF and APRIL. BCMA is essential for the maintenance of long-lived plasma cells, an effect mediated by its ligands, APRIL or BAFF. These plasma cells produce IgG that protect not only against pathogens but are also critically involved in autoimmune diseases. Further, BCMA engagement on activated B cells induces MHC class II, enhancing their ability to present antigen. Differentiation of B cells from stem cells in the bone marrow proceeds through immature B cells to mature B cells in the periphery to plasma cells in the bone marrow. While CD19 as a B cell marker is present on all of these except for plasma cells, BCMA is mostly present at high levels on plasma cells, but is also present on some memory B cells and plasmablast cells that express CD19. Note that since plasma cells are not present in the periphery monitoring of these cells by flow cytometry requires a bone marrow sample which, unlike peripheral blood serum, can only be obtained infrequently due to patient care restrictions. Gamma-secretase directly cleaves BCMA, releasing soluble BCMA (sBCMA) which acts as a decoy, neutralizing APRIL. In multiple sclerosis, sBCMA levels in spinal fluid are elevated and associated with intracerebral IgG production, and in systemic lupus erythematosus, sBCMA levels in serum are elevated and correlate with disease activity. In this example, soluble BCMA levels in peripheral blood serum were studied as a surrogate for the level of BCMA-expressing plasma cells in bone marrow. Longitudinal sera were collected from multiple myeloma patients enrolled on a trial of CAR-BCMA. The levels of sBCMA, BAFF and APRIL were measured. Given the strong correlations seen between CAR-BCMA and sBCMA, levels of sBCMA were then examined in multiple myeloma patients treated with CAR-19. Since these results in turn showed that sBCMA levels correlate with successful CAR19 therapy, this analysis was then extended to samples from patients with other B-cell malignancies treated with CAR19. These results support the use of sBCMA as a biomarker for minimal residual disease in several B cell malignancies.

### Materials and Methods

[1338] Patient Serum was processed and stored at −80° C. until use in ELISA assays. Note that although multiplexed ELISA was used to measure sBCMA, BAFF and APRIL in serum samples, this was largely due to the objective of measuring all three of these analytes. It would have been possible to utilize a variety of other immunological or physical methods to measure sBCMA, APRIL and BAFF, such as the traditional single analyte ELISA plate assay, single analyte Luminex assay, ProteinSimple, Simoa, SomaLogic, Singulex, Olink. DuoSet ELISA kits for human BCMA (DY193), APRIL (DY884B) and BAFF (DT124-05) were purchased from R&D Systems (Minneapolis, MN). PBS pH7.2, 10× (70013-032), Tween 20 (003005), Amplex UltraRed reagent (A36006) were all from Thermo Fisher Scientific (Waltham, MA). BSA (BSA-50) was from Rockland (Limerick, PA). EASYBind 8-well strips (ES58400) was from Azer Scientific (Morgantown, PA). DMSO (D8418-50ML), H2O2 (H1009-100ML) were from Sigma-Aldrich (St. Louis, MO).

[1339] Method to carry out the multiplex ELISA using 8-well strips is as follows. For each analyte, 12 of the strips are enough to test 48 samples in duplicates. Capture antibody (cap AB) diluted in 11 ml of PBS at the working concentration is used to coat every 12 strips in one column of the 4-column reservoir. Gently mix the cap AB with the strips. Seal the 4-column reservoir containing the strips in a Ziploc bag and incubate at room temperature (RT) overnight (ON). On the next day, wash the strips in PBS/0.05% Tween 20 (PBST) 2× and block the strips in 1% BSA/PBS (RD) for 1 hour at RT. Block an assay plate by adding 300 ul/well of RD at the same time. Meanwhile, serum samples cryopreserved at −80° C. with requested time points were thawed. Serum samples diluted at 1:2 in RD were used to test APRIL and BAFF, while serum samples diluted at 1:50, 1:200 or 1:1000 in RD were used to test BCMA. Standard (STD) curves for each analyte was made by diluting STD 1 (5000 μg/ml) at 1:2.5 dilution in RD and continue to STD7. Blank is RD only. At the end of blocking, remove RD from the assay plate and transfer the strips to the corresponding column of an assay plate according to an assay map. Transfer 200 ul of the STDs, blank and samples into each well according to the above assay set-up map. Gently mix the samples with the strips. Seal the assay plate containing the strips in a Ziploc bag and incubate at 4° C. ON. On the next day, block a 4-column reservoir with 20 ml RD/column for 5 minutes. Remove the blocking buffer, and prepare 11 ml of the detection AB/column at working concentration for each analyte using RD. Wash the strips in PBST 2×. Each 12 strips for the same analyte were incubated in one column of the 4-column reservoir containing the corresponding detection AB for 2 hours at RT. Afterwards, wash the strips in PBST 2× and incubate with 11 ml of the corresponding HRP conjugate for 1 hour at RT. Meanwhile, prepare substrate. For every 12 strips, 11 ml of PBS is mixed with 55 ul of the 10 mM Amplex UltraRed and 2.5 ul of 30% H₂O₂. Transfer 100 ul/well of the substrate to a round bottom clear 96-well substrate plate. At the end of HRP incubation, wash the strips in PBST 4×. Transfer each strip to one column of the substrate plate according to a substrate map. Let the color develop for 10 to 30 minutes. Stop the color reaction by removing the strips. Read and analyze the plate using FLUO STAR OMEGA (BMG LABTECH, Ortenberg, Germany) following their protocol.

[1340] Data quality was examined based on the following criteria. The STD curve for each analyte has a R2 value >0.95 at 4-parameter fit based on FLUO STAR analysis software. The results for the in house control should be within the 95% of CI (confidence interval) derived from historical in house control data for the tested analytes. No further tests were done on samples with results out of range low (<OOR) derived from samples at 1:2 dilution. Samples with results that were <OOR derived from higher than 1:2 dilution were re-tested at lower dilutions. Samples with results that were out of range high (>OOR) were re-tested at higher dilutions. Results that passed the above quality controls or retests were used in translational correlative studies.

### Results

1. sBCMA, BAFF and APRIL Serum Levels in Multiple Myeloma Patients Treated with CAR-BCMA

[1341] This Example used a multiplex ELISA to measure sBCMA, BAFF and APRIL in longitudinal cryopreserved serum samples from six adult multiple myeloma patients treated with CAR-BCMA on the clinical trial UPCC14415 ‘Pilot Study of Redirected Autologous T Cells Engineered to Contain an Anti-BCMA scFv Coupled to TCR(and 4-1BB Signaling Domains in Patients With Relapsed and/or Refractory Multiple Myeloma’. The expansion and persistence of CAR-BCMA in the patient peripheral blood was monitored by flow cytometry using a streptavidin tagged human BCMA-Fc fusion protein as a detection reagent, and by qPCR on peripheral blood DNA using primers specific for the 4-1BB costimulatory domain.

[1342] The levels (ng/ml) of serum sBCMA, BAFF and APRIL over time for the first six evaluable UPCC14415 patients on this study were measured (FIG. 3). The Y axis is on a logarithmic scale. Of these six patients only patients 01 and 03 are clinical responders. Patients 02, 09, 10 and 11 are non-responders, in whom the sBCMA levels do not significantly change from baseline which is in the 100s of ng/ml for patients 02, 09 and 11 and in the 1000s for patient 10. In the two patients who do respond to CAR-BCMA therapy and in whom CAR-BCMA proliferate and expand (FIG. 4), the sBCMA levels decline from the baseline level of high 1000s ng/ml by three logs (patient 01), and by about 2.5 logs (patient 03). Notably in both patients this decline is followed after 150 days (patient 01) and 120 days (Patient 03) by a recovery of sBCMA that is more obvious in patient 03.

[1343] FIG. 4 is a plot of CAR-BCMA levels (circles) as measured by qPCR and expressed as copies of the CAR-BCMA construct per microgram of blood DNA vs. serum sBCMA in ng/ml (quares). Only the responding patients 01 and 03 have expansion of CAR-BCMA to >100,000 copies/microgram DNA. In these two patients the sBCMA levels are inversely correlated with CAR-BCMA levels. Patient 1 remains in clinical remission as of day 270. Patient 03 however, relapsed at around day 150, and is the most dramatic example of inverse correlation of sBCMA and CAR-BCMA, as the square and circle lines cross twice, first at 10 days when the sBCMA declines and the CAR-BCMA expand, and again 160 days later as the CAR-BCMA levels drop below 100 copies/microgram and the sBCMA levels rise back above 100 ng/ml. Both these patients experienced cytokine release syndrome (CRS) during their CAR-BCMA expansion period.

[1344] FIG. 3 also shows the BAFF and APRIL levels in serum over time. Briefly, these two analytes are present at lower levels (range 1-20 ng/ml for BAFF and 0-10 ng/ml for APRIL), show less dramatic kinetics than BCMA, and are not as clearly correlated with clinical outcome. There is a 1 to 1.5 log increase in both these two analytes in serum from the two responding patients (01 and 03) during the first 20 days after CAR-BCMA infusion which corresponds to the period of cytokine release syndrome that these two patients experienced. After this period the BAFF and APRIL kinetics are mostly flat.

2. sBCMA, BAFF and APRIL Serum Levels in Multiple Myeloma Patients Treated with CAR19

[1345] In this Example, it was hypothesized that sBCMA levels in serum of multiple myeloma patients might be affected by CAR-19 therapy, since flow cytometry data (data not shown) indicated that some of these patients achieved CD19 aplasia (absence of CD19 cells in their peripheral blood and/or bone marrow mononuclear cells as detected by flow cytometry). Thus sBCMA, BAFF and APRIL levels were tested in serum from eleven multiple myeloma patients, ten enrolled on UPCCO02413, and one on UPCC19413, a compassionate use, single patient protocol. FIGS. 5A, 5B and 5C show plots of levels of CAR-19 (circles) as measured by qPCR and expressed as copies of the CAR-19 construct per microgram of blood DNA vs. serum sBCMA in ng/ml (squares). The horizontal dotted line is the average serum sBCMA level of 38.75 ng/ml that was empirically determined by measuring a panel of 14 normal donor sera with the same assay (data not shown). As is clear from FIGS. 5A-5C, there is an inverse correlation between CAR19 levels and serum sBCMA levels in all eleven patients. The most common pattern is expansion of CAR19, peaking at around Day 10, with an immediate decline in sBCMA below the level seen in normal subjects. Typically CAR19 then contract in numbers and drop below the level of detection, although in some patients (02, 07, 12) there is some level of longer-term CAR19 persistence. There is a rebound in serum BCMA that happens at some point. The length of time during which the patient is in sub-normal sBCMA varies greatly, one extreme being UPli2413-01 who experienced sBCMA rebound at around 500 days after CAR19 infusion. At the other extreme, patient UPtC02413-06 had recovery of sBCMA at about 60 days after CAR-19. In summary, there is very strong evidence that CAR19 therapy in multiple myeloma patients reduces serum sBCMA, and that sBCMA rebounds following loss of CAR19.

3. sBCMA, BAFF and APRIL Serum Levels in Patients with B Cell Malignancies (CLL, ALL, NHL) Treated with CAR19

[1346] Given the results above in multiple myeloma patients treated with CAR19, these studies were expanded to other patients with other B cell malignancies who had been treated with CAR19. Table 37 summarizes the clinical trials, indication, CAR-T therapies and observed sBCMA responses to therapy. The myeloma results have been described above in Sections 1 and 2.

TABLE 37
Summary of clinical trials, indication, CAR-T therapies and sBCMA responses to therapy

| Study | Disease (# patients tested) | Therapy | Serum sBCMA levels |
|---|---|---|---|
| UPCC14415 | Multiple Myeloma (6) | CAR-BCMA | Most much higher than ND, lower |
| | | | after treatment, rebound during relapse |
| UPCC19413 | Multiple Myeloma (1) | mCAR19 | 1 patient, much higher than ND, lower |
| | | | after treatment, rebound during relapse |
| UPCC02413 | Adult Multiple Myeloma (11) | mCAR19 except for | Most much higher than ND, lower |
| | | huCAR19 -10, -12, -03R | after treatment, rebound during relapse |
| UPCC03712 | Adult CLL (2) | mCART19 | Higher than ND, lower after treatment, |
| | | | rebound during relapse |
| UPCC13413 | NHL (2) | mCAR19 except for | Lower than ND |
| | | huCAR19 13413-09, -36 | |
| UPCC19214 | Adult Pancreatic Cancer (3) | huCAR19 + mCART- | ~ND level, lower after treatment |
| | | meso | |
| UPCC21413 | Adult ALL (4) | mCAR19 | Much lower than ND, lower after |
| | | | treatment |
| CHP959 | Pediatric ALL (3) | mCAR19 | Much lower than ND, lower after |
| | | | treatment |
| UPCC31415 | ALL (3) | CAR-22 | Around ND, no obvious treatment |
| | | | effect |

[1347] The results suggest that serum sBCMA levels in ALL and NHL and pancreatic cancer are similar or lower than normal subjects. However, one of the two CLL patients (UPCC03712-1000-00040) is a clinical non-responder with a small expansion of CAR19 around Days 15-20 post infusion, CD19 aplasia at day 21, and then rebound of malignancy by Month 2. The baseline (pre-CAR19 therapy) sBCMA level is much higher than normal range, decreases on CAR19 infusions to normal or lower, and then increases again at month 2 and 3 when the patient relapsed (data not shown). The other patient, (UPCC03712_1000_00045) was a clinical responder with good CAR19 expansion peaking at day 14 post infusion who had a baseline sBCMA level of about 2×normal range, and this decreased with CAR19 therapy to sub-normal range and stayed there out to 1 year (the last timepoint tested) after CAR19 (data not shown). The patient went into CD19 aplasia by Day 14, and stayed in aplasia until Month 5 when the beginning of normal B cell reconstitution was observed.

### Conclusion

[1348] Serum BCMA is a potentially useful biomarker for minimal residual disease in several B cell malignancies. Serum sBCMA is an excellent and convenient minimal residual disease (MRD) biomarker for CAR-BCMA efficacy in multiple myeloma. Serum sBCMA seems to be a very good biomarker for CAR19 efficacy in multiple myeloma. These Experiments suggest serum sBCMA is a marker in CLL, where treatment with CAR19 can reduce serum sBCMA and CD19 relapse is accompanied by elevated sBCMA.

### Example 6: Pilot Study of Anti-CD19 Chimeric Antigen Receptor T Cells (CTL019) in Conjunction with Salvage Autologous Stem Cell Transplantation for Advanced Multiple Myeloma

[1349] Sox2 is a transcription factor that promotes pluripotency and self-renewal, and is implicated in cancer stem cell phenotypes. Anti-Sox2 antibodies are associated with reduced risk of progression in MGUS patients, are generally absent in untreated multiple myeloma and post-ASCT, and emerge in some multiple myeloma patients after allogeneic stem cell transplant. This Example tests the hypothesis that CTL019 would target myeloma stem cells, triggering an immune response encompassing other stem-cell antigens. According to they hypothesis, subjects with most prolonged time-to-progression after ASCT+ CTL019 would exhibit anti-Sox2 immune responses.

[1350] It was observed that antibodies against the Sox2 emerged specifically in 2 subjects with most prolonged PFS compared to prior ASCT. More particularly, FIG. 6 shows that subjects 1 and 5 developed anti-Sox2 antibodies after CTL-019 therapy. This was not likely an artifact of general immune reconstitution or low disease burden in these subjects.

### Example 7: Biomarkers of Response to Anti-CD19 Chimeric Antigen Receptor (CAR) T-Cell Therapy in Patients with Chronic Lymphocytic Leukemia

[1351] This Example reports the pharmacokinetics of CTL019 cells in CLL patients. Dramatically different proliferation potential of T cells in responders vs. nonresponders to CTL019 were observed. More particularly, peak expansion and persistence of CTL019 cells was significantly lower in non-responders than every category of responders (CR, PR_{TD}, and PR) (FIG. 7). There were also significant differences in in vitro proliferation, e.g., between non-responders and CR or PR_{TD} (partial response, transfusion dependent) subjects (FIG. 7).

[1352] It was also determined that CD19-directed T cells manufactured from CR and PR_{TD} subjects elaborated higher levels of STAT3 signaling mediators and targets, compared to PRs and NRs, which was consistent with STAT3 pathway upregulation in CAR stimulated CR and PR_{TD} patient CTL019 cells. In particular, IL-6, IL-17, IL-22, IL-31, CCL20, and a STAT3 gene set showed significant differences between different patient populations, e.g., CR, PR_{TD}, PR, and NR (FIG. 8).

[1353] It was also determined that the frequency of CD8+T_{SCM} cells in pre-manufactured cells predicts response (data not shown). The percent of cells that are CD8+T_{SCM} was significantly higher in CR or PR_{TD} compared to PR or NR subjects.

[1354] It was also observed that statistically significant lower frequencies of ex vivo CD27+CD45RO-CD8+ patient T cells expressing Ki-67 and elevated levels of granzyme B compared to their CD27+CD45RO+ counterpart (data not shown; p<0.0001).

[1355] Combination of biomarkers were assessed for predicting response to CTL019. Responders versus non-responders could be predicted by the presence of CAR+CD8+CD27+PD1-cells (AUC=0.92 in a plot of sensitivity versus specificity), CAR+CD8+CD27+(AUC=0.70), and CAR+CD8+PD1−(AUC=0.73). Complete responders versus non-responders could be predicted by the presence of CAR+CD8+CD27+PD1-cells (AUC=0.94), CAR+CD8+CD27+(AUC=0.75), and CAR+CD8+PD1−(AUC=0.82). There was a highly significant association between the likelihood of having a response to CTL019 therapy and the infusion of CTL019 products containing a high dose of CD8+PD1-CD27+ CAR T cells.

### Example 8: Cellular Kinetics of CD19-specific Chimeric Antigen Receptor T Cells (CTL019) in Patients with Chemotherapy Resistant or Refractory CD19+ Leukemias

[1356] CTL019 persistence was measured in patients having ALL (pediatric ALL or adult ALL) or CLL. Patient response was divided into three categories, CR/CRi, PR/PRi, and NR/PD. CTL019 persisted beyond 400 days in all three indications with higher levels in CR/CRi patients. The median T ½ in CR/CRi was ˜20 days, being only ˜2 days in NR. Persistence has been observed to 780 days.

[1357] Persistence was also calculated by AUC28. In ALL, a number of CR patients displayed an AUC of above about 5×10⁵ or 1×10⁶ CTL019 genomic DNA×time. In CLL, a number of CR or PR patients displayed an AUC of above about 5×10⁵ or 1×10⁶ CTL019 genomic DNA×time, and a number of NR/PD patients displayed an AUC of below about 1×105 or 5×10⁴. A strong concordance was observed between AUCO-28d, AUCO-84d, and Cmax determined qPCR and flow cytometry.

[1358] In addition, CTL019 trafficking in bone marrow observed beyond 350 days in patients achieving CR/Cri.

### Example 9: Predictors of Manufacturing (MFG) Feasibility for Chimeric Antigen Receptor (CAR) T Cells in Non-Hodgkin Lymphoma (NHL)

[1359] As raw material for CAR T cell manufacture, patient apheresis products show variation due to treatment and disease-related factors. Patient peripheral blood laboratory values were used to identify patients at “high risk” of manufacturing fail prior to collection. This Example also explores various methods to mitigate these risks and increase manufacturing success rate.

[1360] Manufacturing data was analyzed for 45 patients enrolled in a Phase IIa CD19 CAR study, NCT02030834, for relapsed/refractory NHL. Complete blood counts with differential for each patient prior to apheresis was correlated with manufacturing feasibility. Apheresis products were characterized by complete blood count, flow cytometry phenotyping, cell size, and processing pathway. Five manufacturing fails were re-manufactured large scale to produce an infusible dose, and small scale cultures were set up with four products with insufficient T cell growth to test strategies to repair the proliferative capacity.

[1361] Approximately 62% of the patients met the recommended ALC (absolute lymphocyte count) of >500/ul (28/45) at apheresis, and the manufacturing success rate to produce a CAR T product was 93% (2/28 manufacturing fails by cell number and transduction). The manufacturing success rate decreased to 65% for patients with peripheral ALC <500/ul, as 6/17 were manufacturing fails (5/6 due to poor growth). Of patients with ALC <300/ul, 6/10 were manufacturing fails, further reducing the manufacturing success rate to 40%. Overall, infusible CAR T cell product was produced for 37/45 patients (22/28 DLBCL, 13/15 FL, and 2/2 MCL, respectively), for an 82% manufacturing success rate.). Additional NHL apheresis product predictors of manufacturing failure include: AMC <500/uL (27%), <10% lymphocytes (<27%), >60% neutrophils (23%), <25% CD3+CD45+ by FACS (38%), >60% monocytes (33%) and <40% lymphocytes (33%). CD4/CD8 ratio did not predict manufacturing failure. PD1 expression on CD4 or CD8 or bulk T cells did not correlate with proliferative capacity. A second manufacturing collection and/or modified enrichment resulted in a success rate upon second manufacture of 100% (5/5). In each case, the second product underwent cryopreservation/thaw prior to culture compared to positive selection on fresh products for the corresponding failures. This was confirmed in side by side small scale cultures.

[1362] These signatures in NHL patient peripheral blood and apheresis products associated with a high risk of manufacturing fail can be used to select processing steps more likely to result in effective T cell enrichment for transduction and expansion.

### Example 10. Efficacy of CTL019 in Inducing CNS Remissions in Relapsed Refractory ALL Pediatric Patients with CNS Involvement

[1363] Sixty pediatric Acute Lymphocytic Leukemia (ALL) patients were enrolled in a Phase 1/2a clinical trial (CH 959) of CTL019. All patients presented with relapsed/refractory CD19+ ALL, and of those seventeen had central nervous system (CNS) involvement. The patients underwent standard chemotherapy and lymphodepletion regimens prior to administration of CTL019. On Day-1, patients were assessed for the status of their disease in the bone marrow (BM), and for CNS involvement via lumbar puncture (LP). CTL019 was then administered to all patients, and a follow-up assessment to evaluate response to therapy was performed on Day 28. As on Day-1, procedures were performed to assess BM and CNS status on Day 28. Follow-ups were also performed at months 3, 6, 9 and 12 to continue monitoring patient's response to therapy (BM and CNS status) and/or disease progression. The outcomes of patients with CNS relapse were evaluated within 12 months of infusion. CNS relapse was defined as: CNS3 status (>5 WBC/uL with blasts from an lumbar puncture (LP)). Brain/ocular involvement was evaluated by imaging.

[1364] Seventeen of 60 CTL019 treated patients were identified as having a disease with CNS involvement. All 17 patients had a CNS3 status (>5 WBC/uL with blasts from an LP) a median of 4 months prior to infusion, and 3 of those patients had active CNS3 status at time of infusion. Patients ranged from 1st to 7th CNS relapse(s) prior to treatment with CTL019. Ten had isolated CNS relapse and seven had combined BM/CNS relapse. Six patients had ocular involvement and the 3 with active CNS3 had parenchymal changes on brain/spine MRI. Sixteen patients had prior CNS directed radiation and thirteen had undergone prior BMT. CNS relapse was defined as CNS3 by lumbar puncture or brain/ocular involvement by imaging within 12 months of infusion. Table 38 provides a summary of CNS status in all patients.

[1365] As shown in FIG. 9, a complete response (CR) of 93% was observed at Day 28 in this group of patients. CR was subdivided into CR with minimal residual disease (CR, MRD−) or CR without minimal residual disease (CR, MRD+), wherein MRD was defined as <0.01% blasts by flow cytometry. Importantly, all patients had CNS remission, i.e., a 100% CNS remission rate was observed (FIG. 9). Patient response is presented by % ALL blasts in FIG. 9, with 100% CR in groups with <0.01% blasts. Patients who had more than 50% or between 5-50% blasts, had 83% and 88% CR respectively. A small number of patients did not respond to therapy (NR, no response). Cytokine release syndrome (CRS) was observed in 88% of patients, of which 27% had severe CRS.

TABLE 38
CNS status of ALL patients with CNS involvement.

| CNS patient cohort | N = 17 |
|---|---|
| Active CNS3 at time of infusion | 3 |
| Isolated CNS relapse | 10 |
| Combined BM + CNS relapse | 7 |
| No. of prior CNS relapses | 1 to 7 |
| Ocular involvement | 6 |
| Parenchymal changes on neuroimaging | 3 |
| Prior CNS directed radiation | 16 |
| Prior BMT | 13 |

[1366] Importantly, neurotoxicity was not enhanced in the CNS cohort (Table 39). Encephalopathy grade 2-3 was observed in 3/17(18%) CNS vs. 12/43(28%) non-CNS. Seizures grade 2-4 were observed in 1/17(6%) CNS vs. 3/43(7%) non-CNS patients. Vision disturbance, speech disturbance, trigerminal neuralgia and ataxia were only observed in the CNS cohort in 6-12% of patients. Confusion was observed in both groups at low levels, and agitation was only observed in the non-CNS cohort in 5% of patients. Sixteen of 17 patients were CNS1 (no detectable leukemic cells in the cerebrospinal fluid, CSF) on Day 28 post infusion. One patient was not evaluable (N/E) due to rapid progression of disease in the BM. In 2 out of the 3 patients with active CNS3 disease at infusion, 1 was in CR by Day 28, 1 had initial pseudo-progression with CR by 3 months, and the third patient was not evaluable. Twelve of 17 (71%) CNS patients remain in CR 2 to 31 months post-infusion (median 11 months). Five had recurrent BM disease but were CNS negative at relapse. One patient had no response in the BM but this patient's CNS status was not evaluable.

[1367] Of the seventeen patients with CNS involvement in this study, three were Philadelphia chromosome (Ph+) positive. These patients initially presented with 3 to 7 CNS relapses, and remain in a CR state at 8 to 31 months (median 23 months) post CTL019 infusion. None of the 60 patients enrolled in this trial have presented with CNS relapse post-infusion, irrespective of their initial CNS status (i.e., irrespective of whether the patients presented with CNS involvement prior to CTL019 infusion).

[1368] These data suggest that CTL019 as a single agent immunotherapy can induce durable responses in pediatric patients with relapsed/refractory ALL with CNS involvement. Neurotoxicity does not appear to be enhanced in relapsed/refractory ALL patients with CNS involvement compared to relapsed/refractory ALL patients without CNS involvement.

TABLE 39
Summary of toxicities observed in all
ALL patients infused with CTL019

| | | No. of | | | | |
|---|---|---|---|---|---|---|
| | | Patient- | CNS cohort | | Non CNS | |
| Toxicity | Grade | Events | N = 17 | | N = 43 | |
| Seizures | 2 | 2 | 1 | (6%) | 1 | (2%) |
| | 3 | 1 | 0 | | 1 | (2%) |
| | 4 | 1 | 0 | | 1 | (2%) |
| Encephalopathy | 2 | 2 | 0 | | 2 | (4%) |
| | 3 | 14 | 3 | (18%) | 12 | (28%) |
| Vision disturbance | 3 | 1 | 1 | (6%) | 0 | |
| Speech Disturbance | 3 | 2 | 2 | (12%) | 0 | |
| Trigeminal | 3 | 1 | 1 | (6%) | 0 | |
| Neuralgia | | | | | | |
| Confusion | 2 | 3 | 2 | (12%) | 1 | (2%) |

| | | | | | |
|---|---|---|---|---|---|
| Dizziness | 2 | 0 | 0 | 1 | (2%) |

| | | | | | |
|---|---|---|---|---|---|
| Ataxia | 2 | 1 | 1 | (6%) | 0 |

| | | | | | |
|---|---|---|---|---|---|
| Agitation | 2 | 2 | 0 | 2 | (5%) |

### Example 11: Predictors of Manufacturing (MFG) Success for Chimeric Antigen Receptor (CAR) T Cells in Non-Hodgkin Lymphoma (NHL)

[1369] As raw material for CAR T cell manufacture, patient apheresis products show treatment and disease-related variation. Patient peripheral blood laboratory values were used to identify patients at higher risk of manufacturing fail prior to collection. This Example describes various methods to mitigate risk and increase manufacturing success rate of the CAR product.

[1370] Manufacturing data were analyzed for 45 patients enrolled in a Phase IIa CD19 CAR study (NCT02030834) for relapsed/refractory NHL. Apheresis products were characterized by absolute lymphocyte count (ALC), flow cytometry phenotyping and cell size via a multisizer.

[1371] Approximately 62% of patients met the recommended ALC of >500/ul (28/45) at apheresis. The CAR T manufacturing success rate in this group was 93% (2 out of 28 were manufacturing fails) (FIG. 10). The manufacturing success rate decreased to 65% for patients with peripheral ALC <500/ul, as 6 out of 17 were manufacturing fails, of which 5 out of 6 were fails due to poor growth. For patients with ALC <300/ul, 6 out of 10 were manufacturing fails, further reducing the manufacturing success rate to 40%. Overall, infusible CAR T cell product was produced for 37 out of 45 patients, for an 82% manufacturing success rate. FIG. 10 shows the peripheral blood profiles of samples grouped by manufacturing success vs. failure. FIG. 10A shows the ALC in these samples and FIG. 10B shows the % lymphocytes (LY) in the samples. Samples with high manufacturing success rates demonstrate higher starting ALC and more lymphocytes in the periphery. FIGS. 11A-11C further demonstrate the makeup of various immune cell populations in apheresis products grouped by manufacturing success vs. failure. FIG. 11A shows a higher percentage of CD3+CD45+ cells in samples with high manufacturing rates. The samples with high manufacturing rates also had higher % lymphocytes (FIG. 11B) and lower % monocytes (FIG. 11C) in the periphery. In summary, the data showed that apheresis products with >75% monocytes, <23% lymphocytes and <13% CD3+45+ were more likely to fail manufacturing in this study.

[1372] Small scale test expansion was used to model CAR T clinical manufacturing proliferative capacity, and to avoid failure to meet cell number, phenotype, and transduction criteria. The first 10 patients where test expansions were performed passed these tests, and 9 out of 10 samples were successfully manufactured large scale (the 1 manufacturing fail was due to equipment malfunction). Of the initial 10 subjects screened for enrollment in the test expansion study, 4 had ALC <500/ul, but passed the test expansion, and were successfully manufactured. CD4/CD8 ratio did not correlate with manufacturing failure. The level of PD1expression on CD4, CD8, or bulk T cells did not correlate with proliferative capacity.

[1373] A second apheresis collection and/or modified enrichment for manufacture resulted in a success rate of 100% (5 out of 5 samples tested). For each of the samples, the second product underwent a cryopreservation and thaw cycle prior to culture compared to positive selection on fresh products for the corresponding failures. This was confirmed in side by side small scale cultures with the first product (FIGS. 12A-D and Table 40). FIGS. 13A-B shows T cell enrichment post-thaw due to loss of CD45 dim or CD45 negative cells from two patient samples. As further demonstrated in FIGS. 14A-14B, myeloid derived suppressor cells are sensitive to a freeze-thaw cycle (cryopreservation followed by thawing), as indicated by the decrease in CD15+ and CXCR2+ cells post-thaw for two samples. Taken together, the data suggests that cryopreservation enriched T cells and reduced potential suppressive non-lymphoid cell subsets (e.g., myeloid derived suppressor cells (MDSC)) thus improving manufacturing success rates of samples whose fresh cells had previously failed manufacturing.

[1374] Signatures in NHL patient peripheral blood and apheresis products associated with high risk of manufacturing fail can be used to select processing steps more likely to result in effective T cell enrichment, transduction, and expansion. For patients with ALC <500/ul, a small scale test expansion incorporated with select processing steps may predict clinical manufacturing success. This strategy to increase the likelihood of engineered T cell manufacturing success may also be applicable for patients with other hematologic malignancies and cancers.

TABLE 40
Summary of manufacturing results from 5 samples which failed
at the first manufacturing attempt. (MFG = manufacturing)

| Sample | 10 | 28 | 41 | 13 | 19 |
|---|---|---|---|---|---|
| Input cell source | Fresh APH | Fresh APH | Fresh APH | Fresh APH | Fresh APH |
| for 1^{st} MFG run | | | | | |
| Outcome of 1^{st} | FAIL | FAIL | FAIL | FAIL | FAIL |
| MFG run | | | | | |
| Collection for 2^{nd} | 2^{nd} Collection | 2^{nd} Collection | 2^{nd} Collection | 1^{st} Collection | 1^{st} Collection |
| MFG | | | | | |
| Input cell source | Cryopreserved/ | Cryopreserved/ | Cryopreserved/ | Cryopreserved/ | Cryopreserved/ |
| for 2^{nd} MFG run | Thawed | Thawed | Thawed | Thawed | Thawed |
| Outcome of 2^{nd} | SUCCESS | SUCCESS | SUCCESS | SUCCESS | SUCCESS |
| MFG run | | | | | |

### Example 12: CTL019 for the Treatment of Pediatric and Young Adult Patients with Relapsed/Refractory B-Cell Acute Lymphoblastic Leukemia Clinical Development Program

[1375] The efficacy and safety of CTL019 has been established in 3 trials involving over 150 pediatric and young adult patients with r/r B-cell ALL (Table 42).

[1376] Study B2101J was the first clinical study conducted in pediatric and young adult patients with r/r CD19+ hematologic malignancies using CTL019 (N=71). The primary objective of this trial was to determine the safety, tolerability, and engraftment potential (duration of in vivo survival measured by qPCR) of tisagenlecleucel in patients with r/r and incurable CD19+ B-cell malignancies (CD19+ leukemia or lymphoma). Entry criteria were designed to include pediatric and young adult patients aged 1 to 24 years with CD19+ B-cell malignancies with no available curative treatment options (such as autologous or allogeneic SCT) who had a limited prognosis (several months to <2-year survival) with currently available therapies. Up to three infusions and a wide dose range were allowed.

[1377] Study B2205J is a multicenter study conducted in the US and similar both in design and study objectives to the pivotal registration trial (Study B2202). Due to its earlier start date, there is a longer duration of follow-up available for this trial compared to Study B2202. Other differences from Study B2202 included a smaller number of patients enrolled (35 vs. 88 patients, respectively), and the geographical location of the clinical and manufacturing sites. In addition, patients with lymphoblastic lymphoma were allowed to participate in this trial but not in Study B2202.

[1378] Study B2202 is the pivotal registration trial and is a global, multicenter, single-arm, open-label phase II study designed to determine the efficacy and safety of CTL0191 in pediatric and young adult patients with r/r B-cell ALL (N=88). Patients were aged between 3 years at the time of screening and 21 years at the time of initial diagnosis. The single-arm study design was supported by the absence of effective therapies in this setting, and the high unmet medical need of the target patient population.

TABLE 42
Pediatric and young adult r/r B-cell ALL clinical development program

| | | | | |
|---|---|---|---|---|
| Study | Population, study | No. of | Tisagenlecleucel | |
| No. | design, and objectives | patients | allowable dose range | Efficacy endpoints |

Supportive trials

| | | | | |
|---|---|---|---|---|
| B2101J | Single-arm, open-label, | Enrolled: N = 71 | Multiple infusions | Primary: Safety, feasibility |
| | US, single-center, | Infused: N = 55 | Up to a total target dose of | of manufacture, and |
| | phase-I/IIa trial | | 1.5 × 10⁷ to 5 × 10⁹ total T | persistence |
| | Safety, tolerability, and | | cells (0.3 × 10⁶ to | Secondary: IRC-assessed |
| | engraftment potential | | 1.0 × 10⁸/kg) | ORR |
| B2205J | Single-arm, open-label, | Enrolled: N = 35 | Single infusion | Primary: IRC-assessed |
| | US, multicenter, phase- | Infused: N = 29 | ≤50 kg: 0.2 to 5.0 × 10⁶ | ORR |
| | II trial | | transduced viable T cells/kg | Secondary: DoR, BOR, |
| | Efficacy and safety | | >50 kg: 0.1 to 2.5 × 10⁸ | EFS, OS, Safety |
| | | | transduced viable T cells | |

Pivotal registration trial

| | | | | |
|---|---|---|---|---|
| B2202 | Single-arm, open-label, | Enrolled: N = 88 | Single infusion | Primary: IRC-assessed |
| | international, | Infused: N = 68 | ≤50 kg: 0.2 to 5.0 × 10⁶ | ORR |
| | multicenter, phase-II | | transduced viable T cells/kg | Secondary: DoR, BOR, |
| | trial | | >50 kg: 0.1 to 2.5 × 10⁸ | EFS, OS, Safety |
| | Efficacy and safety | | transduced viable T cells | |

ALL Acute lymphoblastic leukemia;
BOR Best overall response;
DoR Duration of remission;
EFS Event-free survival;
IRC Independent Review Committee;
ORR Overall remission rate;
OS Overall survival;
r/r Relapsed/refractory

### Patient Populations

[1379] Patients recruited to Studies B2101J and B2205J were representative of the clinical population of pediatric and young adult patients with r/r B-cell ALL.

[1380] The focus of the Study B2101J analysis was on 55 patients with non-CNS3 ALL who received treatment with CTL019. Median age was 11 years (range: 1 to 24). All patients had a Karnofsky/Lansky performance status score of ≥50%. Patients were heavily pretreated (89.1% had received ≥3 and 16.4% had received ≥6 prior regimens), and 63.6% had undergone prior SCT. Available mutation data were limited.

[1381] Study B2205J enrolled 35 pediatric and young adult patients with r/r B-cell ALL, with a median age of 12 years (range: 3 to 25) (Table 5-2). Twenty-nine patients were infused with CTL019; all had a Karnofsky/Lansky performance status score ≥50%, and included individuals with high-risk mutations. Patients had received a median of 3 prior therapies (range: 1 to 9) and 58.6% had failed prior allo-SCT.

[1382] In Study B2202, demographic and baseline disease characteristics reflected the target pediatric and young adult patient population with r/r B-cell ALL for whom the drug is intended. The study enrolled patients with r/r B-cell ALL across 25 centers in the US, Canada, the EU, Australia, and Japan. Patients were aged 3 to 23 years (median: 12) with a Karnofsky/Lansky performance status score of >50%. The population consisted of patients with high-risk mutations following a median of 3 prior therapies (range: 1 to 8), with 58.8% of patients having failed prior allo-SCT.

### Dose-Selection Rationale

### Clinical Target Dose

[1383] The initial dose selection for the first clinical study (Study B2102J) with CTL019 was based on in vivo models of ALL in which human pre-B ALL cells were engrafted into immunodeficient mice. These mice received doses of 1, 5, and 20×10⁶ cells. Anti-leukemic treatment effects were observed, supporting further investigation of doses of 5 and 20×10⁶ cells in mouse models.

[1384] Formal dose-escalation studies were not conducted. The target CTL019 doses for Studies B2202 and B2205J were:
[1385] 2.0 to 5.0×10⁶ transduced viable T-cells per kg body weight for patients ≤50 kg
[1386] 1.0 to 2.5×10⁸ transduced viable T cells for patients ≥50 kg

[1387] Importantly, once infused, the transduced cells are expected to expand in vivo and there appears to be no clear relationship between CTL019 dose and expansion across the wide dose range tested.

### Allowable Infused Dose Ranges

[1388] In the early clinical studies the target dose was not always achieved due to characteristics of the collected cells, and yet responses were observed; as a result, an allowable dose range was established for Studies B2202 and B2205J:
[1389] 0.2 to 5.0×10⁶ transduced viable T cells per kg for patients ≤50 kg
[1390] 0.1 to 2.5×10⁸ transduced viable T cells for patients ≥50 kg.

### Dose-Response Analysis for CTL019

[1391] FIGS. 15A and 15B show dose-response curves for patients ≤50 kg (FIG. 15A) or for patients >50 kg (FIG. 15B) administered with a range of doses of CTL019. Patients ≤50 kg showed an increasing trend in the probability of response for doses up to 2.0×10⁶ transduced viable T cells/kg with a plateau for higher doses (e.g., doses >2.4×10⁶ transduced viable T cells/kg)(FIG. 15A). Responses were also observed at the lowest dose tested, i.e., 0.2×10⁶ transduced viable T cells/kg.

[1392] For patients >50 kg, FIG. 15B demonstrates a similar trend in the probability of response for doses up to 1.0×10⁸, with a plateau for higher doses. In this patient group, responses were also observed at the lowest dose tested, i.e., 0.2×10⁸. For both patient cohorts, clinical benefit was evident at lower doses.

### Example 13: Clinical Pharmacology and Biopharmaceutics in Pediatric Patients with Relapsed or Refractory Acute Lymphoblastic Leukemia

[1393] Data from two phase 2 studies (ELIANA; NCT02435849 and ENSIGN; NCT02228096) in pediatric and young adult R/R B-cell ALL were pooled to evaluate the cellular kinetics of CTL019, humoral immunogenicity, AUC 0-28d (exposure)—response analysis, and impact of intrinsic, extrinsic and manufacturing factors on CTL019 expansion.

### Methods

[1394] Cellular kinetic parameters of CTL019 post infusion were derived using traditional pharmacokinetic principles and reported by response category (complete response [CR]/CR with incomplete blood count recovery [CRi] vs no response [NR]) using 2 assays of peripheral blood cells: qPCR and flow cytometry. AUC 0-28d-response relationships were evaluated by logistic regression. Relationships between manufacturing specifications, therapies for cytokine release syndrome (CRS) management, and anti-CAR19 antibodies on cellular kinetics were explored using summary statistics and graphical- and model-based analyses.

### Results

[1395] Data from 79 pts (ELIANA, n=50; ENSIGN, n=29) were pooled for analysis. Using qPCR, pts with CR/CRi (n=62) had about a 2-fold higher CTL019 expansion than patients with NR (n=7) (Cmax, 73.5% higher geometric [geo] mean; AUCO-28d, 104% higher geo mean; Table 41). Patients with NR had delayed Tmax compared with patients with CR/CRi (20 vs 10 days). Intrinsic patient factors including baseline cytogenetics, disease characteristics, and disease status did not appear to affect Cmax or AUCO-28d with the exception that patients with a higher tumor burden at enrollment generally had higher expansion, based on box plots and summary statistics. Extrinsic factors (e.g., prior lines of therapy or stem cell transplant) and parameters related to the manufactured product (e.g., % T cells, transduction efficiency, cell viability, or total cell count), did not appear to impact cellular kinetics, based on graphical analysis. AUCO-28d increased with presence and severity of CRS. Patients who received anti-cytokine agents for grade 3/4 CRS also had higher expansion. CR/CRi patients treated with tocilizumab and steroids (n=17) had 89% higher AUCO-28d than CR patients who did not receive tocilizumab and steroids (n=45). Moderate correlation was observed between transgene levels and CAR surface expression in peripheral blood (r²=0.592) by qPCR and flow cytometry, respectively, when matched by time points from the cellular kinetic profile. Slower B-cell recovery was observed in patients with AUCO-28d above the median. Post-dose anti-CAR19 antibody responses were determined from the fold change of anti-CAR19 antibodies above the baseline pre-dose value. Patients with treatment-induced or boosted anti-CAR19 antibody responses generally had lower expansion, based on box plots, compared with patients with treatment-unaffected anti-CAR19 antibody responses, although AUCO-28d was variable. The boosted levels of anti-CAR19 did not impact clinical response or relapse.

TABLE 41

| Parameter | Statistics | CR/CRi (n = 62) | | NR (n = 7) | |
|---|---|---|---|---|---|
| AUC0-28 d | n | 61 | | 6 | |
| (copies/μg DNA × days) | CR/CRi fold change over NR | 2.0 | | | |
| Cmax (copies/μg) | n | 61 | | 7 | |
| | CR/CRi fold change over NR | 1.7 | | | |
| Tmax (days) | n | 61 | | 7 | |
| | Median (range) | 9.91 | (0.00784-27.0) | 20.0 | (0.0276-62.7) |
| T½ (days) | n | 54 | | 3 | |
| | Median (range) | 14.8 | (2.03-208) | 1.46 | (1.12-9.65) |

* Unknown response, n = 10

### Conclusion

[1396] There was increased expansion of CTL019 in patients with higher tumor burden at enrollment, which correlated with higher CRS grade. A relationship between dose and expansion was not observed, thereby supporting the wide dose range used. Expansion was not attenuated, e.g., by tocilizumab or steroids, indicating therapies for CRS, e.g., do not abrogate CTL019 proliferation. Cellular kinetics are important to understand the determinants of tumor response with CAR T-cell therapy.

### Equivalents

[1397] The disclosures of each and every patent, patent application, and publication cited herein are hereby incorporated herein by reference in their entirety. While this invention has been disclosed with reference to specific aspects, it is apparent that other aspects and variations of this invention may be devised by others skilled in the art without departing from the true spirit and scope of the invention. The appended claims are intended to be construed to include all such aspects and equivalent variations.

The application's sequence listing, which the Patent Office published only in electronic form, follows.

SEQUENCE LISTING (4002 sequences)

SEQ ID NO: 1 - protein, 242 aa, synthetic construct
  REGION 1..242: note = source = /note="Description of Artificial Sequence: Synthetic polypeptide"
EIVMTQSPATLSLSPGERATLSCRASQDISKYLNWYQQKPGQAPRLLIYHTSRLHSGIPARFSGSGSGTDYTLTISSLQPEDFAVYFCQQGNTLPYTFGQGTKLEIKGGGGSGGGGSGGGGSQVQLQESGPGLVKPSETLSLTCTVSGVSLPDYGVSWIRQPPGKGLEWIGVIWGSETTYYSSSLKSRVTISKDNSKNQVSLKLSSVTAADTAVYYCAKHYYYGGSYAMDYWGQGTLVTVSS

SEQ ID NO: 2 - protein, 242 aa, synthetic construct
  REGION 1..242: note = source = /note="Description of Artificial Sequence: Synthetic polypeptide"
EIVMTQSPATLSLSPGERATLSCRASQDISKYLNWYQQKPGQAPRLLIYHTSRLHSGIPARFSGSGSGTDYTLTISSLQPEDFAVYFCQQGNTLPYTFGQGTKLEIKGGGGSGGGGSGGGGSQVQLQESGPGLVKPSETLSLTCTVSGVSLPDYGVSWIRQPPGKGLEWIGVIWGSETTYYQSSLKSRVTISKDNSKNQVSLKLSSVTAADTAVYYCAKHYYYGGSYAMDYWGQGTLVTVSS

SEQ ID NO: 3 - protein, 242 aa, synthetic construct
  REGION 1..242: note = source = /note="Description of Artificial Sequence: Synthetic polypeptide"
QVQLQESGPGLVKPSETLSLTCTVSGVSLPDYGVSWIRQPPGKGLEWIGVIWGSETTYYSSSLKSRVTISKDNSKNQVSLKLSSVTAADTAVYYCAKHYYYGGSYAMDYWGQGTLVTVSSGGGGSGGGGSGGGGSEIVMTQSPATLSLSPGERATLSCRASQDISKYLNWYQQKPGQAPRLLIYHTSRLHSGIPARFSGSGSGTDYTLTISSLQPEDFAVYFCQQGNTLPYTFGQGTKLEIK

SEQ ID NO: 4 - protein, 242 aa, synthetic construct
  REGION 1..242: note = source = /note="Description of Artificial Sequence: Synthetic polypeptide"
QVQLQESGPGLVKPSETLSLTCTVSGVSLPDYGVSWIRQPPGKGLEWIGVIWGSETTYYQSSLKSRVTISKDNSKNQVSLKLSSVTAADTAVYYCAKHYYYGGSYAMDYWGQGTLVTVSSGGGGSGGGGSGGGGSEIVMTQSPATLSLSPGERATLSCRASQDISKYLNWYQQKPGQAPRLLIYHTSRLHSGIPARFSGSGSGTDYTLTISSLQPEDFAVYFCQQGNTLPYTFGQGTKLEIK

SEQ ID NO: 5 - protein, 247 aa, synthetic construct
  REGION 1..247: note = source = /note="Description of Artificial Sequence: Synthetic polypeptide"
EIVMTQSPATLSLSPGERATLSCRASQDISKYLNWYQQKPGQAPRLLIYHTSRLHSGIPARFSGSGSGTDYTLTISSLQPEDFAVYFCQQGNTLPYTFGQGTKLEIKGGGGSGGGGSGGGGSGGGGSQVQLQESGPGLVKPSETLSLTCTVSGVSLPDYGVSWIRQPPGKGLEWIGVIWGSETTYYSSSLKSRVTISKDNSKNQVSLKLSSVTAADTAVYYCAKHYYYGGSYAMDYWGQGTLVTVSS

SEQ ID NO: 6 - protein, 247 aa, synthetic construct
  REGION 1..247: note = source = /note="Description of Artificial Sequence: Synthetic polypeptide"
EIVMTQSPATLSLSPGERATLSCRASQDISKYLNWYQQKPGQAPRLLIYHTSRLHSGIPARFSGSGSGTDYTLTISSLQPEDFAVYFCQQGNTLPYTFGQGTKLEIKGGGGSGGGGSGGGGSGGGGSQVQLQESGPGLVKPSETLSLTCTVSGVSLPDYGVSWIRQPPGKGLEWIGVIWGSETTYYQSSLKSRVTISKDNSKNQVSLKLSSVTAADTAVYYCAKHYYYGGSYAMDYWGQGTLVTVSS

SEQ ID NO: 7 - protein, 247 aa, synthetic construct
  REGION 1..247: note = source = /note="Description of Artificial Sequence: Synthetic polypeptide"
QVQLQESGPGLVKPSETLSLTCTVSGVSLPDYGVSWIRQPPGKGLEWIGVIWGSETTYYSSSLKSRVTISKDNSKNQVSLKLSSVTAADTAVYYCAKHYYYGGSYAMDYWGQGTLVTVSSGGGGSGGGGSGGGGSGGGGSEIVMTQSPATLSLSPGERATLSCRASQDISKYLNWYQQKPGQAPRLLIYHTSRLHSGIPARFSGSGSGTDYTLTISSLQPEDFAVYFCQQGNTLPYTFGQGTKLEIK

SEQ ID NO: 8 - protein, 247 aa, synthetic construct
  REGION 1..247: note = source = /note="Description of Artificial Sequence: Synthetic polypeptide"
QVQLQESGPGLVKPSETLSLTCTVSGVSLPDYGVSWIRQPPGKGLEWIGVIWGSETTYYQSSLKSRVTISKDNSKNQVSLKLSSVTAADTAVYYCAKHYYYGGSYAMDYWGQGTLVTVSSGGGGSGGGGSGGGGSGGGGSEIVMTQSPATLSLSPGERATLSCRASQDISKYLNWYQQKPGQAPRLLIYHTSRLHSGIPARFSGSGSGTDYTLTISSLQPEDFAVYFCQQGNTLPYTFGQGTKLEIK

SEQ ID NO: 9 - protein, 247 aa, synthetic construct
  REGION 1..247: note = source = /note="Description of Artificial Sequence: Synthetic polypeptide"
EIVMTQSPATLSLSPGERATLSCRASQDISKYLNWYQQKPGQAPRLLIYHTSRLHSGIPARFSGSGSGTDYTLTISSLQPEDFAVYFCQQGNTLPYTFGQGTKLEIKGGGGSGGGGSGGGGSGGGGSQVQLQESGPGLVKPSETLSLTCTVSGVSLPDYGVSWIRQPPGKGLEWIGVIWGSETTYYNSSLKSRVTISKDNSKNQVSLKLSSVTAADTAVYYCAKHYYYGGSYAMDYWGQGTLVTVSS

SEQ ID NO: 10 - protein, 247 aa, synthetic construct
  REGION 1..247: note = source = /note="Description of Artificial Sequence: Synthetic polypeptide"
QVQLQESGPGLVKPSETLSLTCTVSGVSLPDYGVSWIRQPPGKGLEWIGVIWGSETTYYNSSLKSRVTISKDNSKNQVSLKLSSVTAADTAVYYCAKHYYYGGSYAMDYWGQGTLVTVSSGGGGSGGGGSGGGGSGGGGSEIVMTQSPATLSLSPGERATLSCRASQDISKYLNWYQQKPGQAPRLLIYHTSRLHSGIPARFSGSGSGTDYTLTISSLQPEDFAVYFCQQGNTLPYTFGQGTKLEIK

SEQ ID NO: 11 - protein, 242 aa, synthetic construct
  REGION 1..242: note = source = /note="Description of Artificial Sequence: Synthetic polypeptide"
EIVMTQSPATLSLSPGERATLSCRASQDISKYLNWYQQKPGQAPRLLIYHTSRLHSGIPARFSGSGSGTDYTLTISSLQPEDFAVYFCQQGNTLPYTFGQGTKLEIKGGGGSGGGGSGGGGSQVQLQESGPGLVKPSETLSLTCTVSGVSLPDYGVSWIRQPPGKGLEWIGVIWGSETTYYNSSLKSRVTISKDNSKNQVSLKLSSVTAADTAVYYCAKHYYYGGSYAMDYWGQGTLVTVSS

SEQ ID NO: 12 - protein, 242 aa, synthetic construct
  REGION 1..242: note = source = /note="Description of Artificial Sequence: Synthetic polypeptide"
QVQLQESGPGLVKPSETLSLTCTVSGVSLPDYGVSWIRQPPGKGLEWIGVIWGSETTYYNSSLKSRVTISKDNSKNQVSLKLSSVTAADTAVYYCAKHYYYGGSYAMDYWGQGTLVTVSSGGGGSGGGGSGGGGSEIVMTQSPATLSLSPGERATLSCRASQDISKYLNWYQQKPGQAPRLLIYHTSRLHSGIPARFSGSGSGTDYTLTISSLQPEDFAVYFCQQGNTLPYTFGQGTKLEIK

SEQ ID NO: 13 - protein, 21 aa, synthetic construct
  REGION 1..21: note = source = /note="Description of Artificial Sequence: Synthetic peptide"
MALPVTALLLPLALLLHAARP

SEQ ID NO: 14 - protein, 45 aa, synthetic construct
  REGION 1..45: note = source = /note="Description of Artificial Sequence: Synthetic polypeptide"
TTTPAPRPPTPAPTIASQPLSLRPEACRPAAGGAVHTRGLDFACD

SEQ ID NO: 15 - protein, 24 aa, synthetic construct
  REGION 1..24: note = source = /note="Description of Artificial Sequence: Synthetic peptide"
IYIWAPLAGTCGVLLLSLVITLYC

SEQ ID NO: 16 - protein, 42 aa, synthetic construct
  REGION 1..42: note = source = /note="Description of Artificial Sequence: Synthetic polypeptide"
KRGRKKLLYIFKQPFMRPVQTTQEEDGCSCRFPEEEEGGCEL

SEQ ID NO: 17 - protein, 112 aa, synthetic construct
  REGION 1..112: note = source = /note="Description of Artificial Sequence: Synthetic polypeptide"
RVKFSRSADAPAYKQGQNQLYNELNLGRREEYDVLDKRRGRDPEMGGKPRRKNPQEGLYNELQKDKMAEAYSEIGMKGERRRGKGHDGLYQGLSTATKDTYDALHMQALPPR

SEQ ID NO: 18 - protein, 5 aa, synthetic construct
  REGION 1..5: note = source = /note="Description of Artificial Sequence: Synthetic peptide"
GGGGS

SEQ ID NO: 19 - protein, 10 aa, synthetic construct
  REGION 1..10: note = source = /note="Description of Artificial Sequence: Synthetic peptide"
GVSLPDYGVS

SEQ ID NO: 20 - protein, 16 aa, synthetic construct
  REGION 1..16: note = source = /note="Description of Artificial Sequence: Synthetic peptide"
VIWGSETTYYNSALKS

SEQ ID NO: 21 - protein, 16 aa, synthetic construct
  REGION 1..16: note = source = /note="Description of Artificial Sequence: Synthetic peptide"
VIWGSETTYYSSSLKS

SEQ ID NO: 22 - protein, 16 aa, synthetic construct
  REGION 1..16: note = source = /note="Description of Artificial Sequence: Synthetic peptide"
VIWGSETTYYQSSLKS

SEQ ID NO: 23 - protein, 16 aa, synthetic construct
  REGION 1..16: note = source = /note="Description of Artificial Sequence: Synthetic peptide"
VIWGSETTYYNSSLKS

SEQ ID NO: 24 - protein, 12 aa, synthetic construct
  REGION 1..12: note = source = /note="Description of Artificial Sequence: Synthetic peptide"
HYYYGGSYAMDY

SEQ ID NO: 25 - protein, 11 aa, synthetic construct
  REGION 1..11: note = source = /note="Description of Artificial Sequence: Synthetic peptide"
RASQDISKYLN

SEQ ID NO: 26 - protein, 7 aa, synthetic construct
  REGION 1..7: note = source = /note="Description of Artificial Sequence: Synthetic peptide"
HTSRLHS

SEQ ID NO: 27 - protein, 9 aa, synthetic construct
  REGION 1..9: note = source = /note="Description of Artificial Sequence: Synthetic peptide"
QQGNTLPYT

SEQ ID NO: 28 - DNA, 5000 bp, synthetic construct
  misc_feature 1..5000: note = /note="This sequence may encompass 50-5000 nucleotides"
  misc_feature 1..5000: note = source = /note="Description of Artificial Sequence: Synthetic polynucleotide"
  source 1..5000: mol_type = other DNA
aaaaaaaaaaaaaaaaaaaaaaaaaaaaaaaaaaaaaaaaaaaaaaaaaaaaaaaaaaaaaaaaaaaaaaaaaaaaaaaaaaaaaaaaaaaaaaaaaaaaaaaaaaaaaaaaaaaaaaaaaaaaaaaaaaaaaaaaaaaaaaaaaaaaaaaaaaaaaaaaaaaaaaaaaaaaaaaaaaaaaaaaaaaaaaaaaaaaaaaaaaaaaaaaaaaaaaaaaaaaaaaaaaaaaaaaaaaaaaaaaaaaaaaaaaaaaaaaaaaaaaaaaaaaaaaaaaaaaaaaaaaaaaaaaaaaaaaaaaaaaaaaaaaaaaaaaaaaaaaaaaaaaaaaaaaaaaaaaaaaaaaaaaaaaaaaaaaaaaaaaaaaaaaaaaaaaaaaaaaaaaaaaaaaaaaaaaaaaaaaaaaaaaaaaaaaaaaaaaaaaaaaaaaaaaaaaaaaaaaaaaaaaaaaaaaaaaaaaaaaaaaaaaaaaaaaaaaaaaaaaaaaaaaaaaaaaaaaaaaaaaaaaaaaaaaaaaaaaaaaaaaaaaaaaaaaaaaaaaaaaaaaaaaaaaaaaaaaaaaaaaaaaaaaaaaaaaaaaaaaaaaaaaaaaaaaaaaaaaaaaaaaaaaaaaaaaaaaaaaaaaaaaaaaaaaaaaaaaaaaaaaaaaaaaaaaaaaaaaaaaaaaaaaaaaaaaaaaaaaaaaaaaaaaaaaaaaaaaaaaaaaaaaaaaaaaaaaaaaaaaaaaaaaaaaaaaaaaaaaaaaaaaaaaaaaaaaaaaaaaaaaaaaaaaaaaaaaaaaaaaaaaaaaaaaaaaaaaaaaaaaaaaaaaaaaaaaaaaaaaaaaaaaaaaaaaaaaaaaaaaaaaaaaaaaaaaaaaaaaaaaaaaaaaaaaaaaaaaaaaaaaaaaaaaaaaaaaaaaaaaaaaaaaaaaaaaaaaaaaaaaaaaaaaaaaaaaaaaaaaaaaaaaaaaaaaaaaaaaaaaaaaaaaaaaaaaaaaaaaaaaaaaaaaaaaaaaaaaaaaaaaaaaaaaaaaaaaaaaaaaaaaaaaaaaaaaaaaaaaaaaaaaaaaaaaaaaaaaaaaaaaaaaaaaaaaaaaaaaaaaaaaaaaaaaaaaaaaaaaaaaaaaaaaaaaaaaaaaaaaaaaaaaaaaaaaaaaaaaaaaaaaaaaaaaaaaaaaaaaaaaaaaaaaaaaaaaaaaaaaaaaaaaaaaaaaaaaaaaaaaaaaaaaaaaaaaaaaaaaaaaaaaaaaaaaaaaaaaaaaaaaaaaaaaaaaaaaaaaaaaaaaaaaaaaaaaaaaaaaaaaaaaaaaaaaaaaaaaaaaaaaaaaaaaaaaaaaaaaaaaaaaaaaaaaaaaaaaaaaaaaaaaaaaaaaaaaaaaaaaaaaaaaaaaaaaaaaaaaaaaaaaaaaaaaaaaaaaaaaaaaaaaaaaaaaaaaaaaaaaaaaaaaaaaaaaaaaaaaaaaaaaaaaaaaaaaaaaaaaaaaaaaaaaaaaaaaaaaaaaaaaaaaaaaaaaaaaaaaaaaaaaaaaaaaaaaaaaaaaaaaaaaaaaaaaaaaaaaaaaaaaaaaaaaaaaaaaaaaaaaaaaaaaaaaaaaaaaaaaaaaaaaaaaaaaaaaaaaaaaaaaaaaaaaaaaaaaaaaaaaaaaaaaaaaaaaaaaaaaaaaaaaaaaaaaaaaaaaaaaaaaaaaaaaaaaaaaaaaaaaaaaaaaaaaaaaaaaaaaaaaaaaaaaaaaaaaaaaaaaaaaaaaaaaaaaaaaaaaaaaaaaaaaaaaaaaaaaaaaaaaaaaaaaaaaaaaaaaaaaaaaaaaaaaaaaaaaaaaaaaaaaaaaaaaaaaaaaaaaaaaaaaaaaaaaaaaaaaaaaaaaaaaaaaaaaaaaaaaaaaaaaaaaaaaaaaaaaaaaaaaaaaaaaaaaaaaaaaaaaaaaaaaaaaaaaaaaaaaaaaaaaaaaaaaaaaaaaaaaaaaaaaaaaaaaaaaaaaaaaaaaaaaaaaaaaaaaaaaaaaaaaaaaaaaaaaaaaaaaaaaaaaaaaaaaaaaaaaaaaaaaaaaaaaaaaaaaaaaaaaaaaaaaaaaaaaaaaaaaaaaaaaaaaaaaaaaaaaaaaaaaaaaaaaaaaaaaaaaaaaaaaaaaaaaaaaaaaaaaaaaaaaaaaaaaaaaaaaaaaaaaaaaaaaaaaaaaaaaaaaaaaaaaaaaaaaaaaaaaaaaaaaaaaaaaaaaaaaaaaaaaaaaaaaaaaaaaaaaaaaaaaaaaaaaaaaaaaaaaaaaaaaaaaaaaaaaaaaaaaaaaaaaaaaaaaaaaaaaaaaaaaaaaaaaaaaaaaaaaaaaaaaaaaaaaaaaaaaaaaaaaaaaaaaaaaaaaaaaaaaaaaaaaaaaaaaaaaaaaaaaaaaaaaaaaaaaaaaaaaaaaaaaaaaaaaaaaaaaaaaaaaaaaaaaaaaaaaaaaaaaaaaaaaaaaaaaaaaaaaaaaaaaaaaaaaaaaaaaaaaaaaaaaaaaaaaaaaaaaaaaaaaaaaaaaaaaaaaaaaaaaaaaaaaaaaaaaaaaaaaaaaaaaaaaaaaaaaaaaaaaaaaaaaaaaaaaaaaaaaaaaaaaaaaaaaaaaaaaaaaaaaaaaaaaaaaaaaaaaaaaaaaaaaaaaaaaaaaaaaaaaaaaaaaaaaaaaaaaaaaaaaaaaaaaaaaaaaaaaaaaaaaaaaaaaaaaaaaaaaaaaaaaaaaaaaaaaaaaaaaaaaaaaaaaaaaaaaaaaaaaaaaaaaaaaaaaaaaaaaaaaaaaaaaaaaaaaaaaaaaaaaaaaaaaaaaaaaaaaaaaaaaaaaaaaaaaaaaaaaaaaaaaaaaaaaaaaaaaaaaaaaaaaaaaaaaaaaaaaaaaaaaaaaaaaaaaaaaaaaaaaaaaaaaaaaaaaaaaaaaaaaaaaaaaaaaaaaaaaaaaaaaaaaaaaaaaaaaaaaaaaaaaaaaaaaaaaaaaaaaaaaaaaaaaaaaaaaaaaaaaaaaaaaaaaaaaaaaaaaaaaaaaaaaaaaaaaaaaaaaaaaaaaaaaaaaaaaaaaaaaaaaaaaaaaaaaaaaaaaaaaaaaaaaaaaaaaaaaaaaaaaaaaaaaaaaaaaaaaaaaaaaaaaaaaaaaaaaaaaaaaaaaaaaaaaaaaaaaaaaaaaaaaaaaaaaaaaaaaaaaaaaaaaaaaaaaaaaaaaaaaaaaaaaaaaaaaaaaaaaaaaaaaaaaaaaaaaaaaaaaaaaaaaaaaaaaaaaaaaaaaaaaaaaaaaaaaaaaaaaaaaaaaaaaaaaaaaaaaaaaaaaaaaaaaaaaaaaaaaaaaaaaaaaaaaaaaaaaaaaaaaaaaaaaaaaaaaaaaaaaaaaaaaaaaaaaaaaaaaaaaaaaaaaaaaaaaaaaaaaaaaaaaaaaaaaaaaaaaaaaaaaaaaaaaaaaaaaaaaaaaaaaaaaaaaaaaaaaaaaaaaaaaaaaaaaaaaaaaaaaaaaaaaaaaaaaaaaaaaaaaaaaaaaaaaaaaaaaaaaaaaaaaaaaaaaaaaaaaaaaaaaaaaaaaaaaaaaaaaaaaaaaaaaaaaaaaaaaaaaaaaaaaaaaaaaaaaaaaaaaaaaaaaaaaaaaaaaaaaaaaaaaaaaaaaaaaaaaaaaaaaaaaaaaaaaaaaaaaaaaaaaaaaaaaaaaaaaaaaaaaaaaaaaaaaaaaaaaaaaaaaaaaaaaaaaaaaaaaaaaaaaaaaaaaaaaaaaaaaaaaaaaaaaaaaaaaaaaaaaaaaaaaaaaaaaaaaaaaaaaaaaaaaaaaaaaaaaaaaaaaaaaaaaaaaaaaaaaaaaaaaaaaaaaaaaaaaaaaaaaaaaaaaaaaaaaaaaaaaaaaaaaaaaaaaaaaaaaaaaaaaaaaaaaaaaaaaaaaaaaaaaaaaaaaaaaaaaaaaaaaaaaaaaaaaaaaaaaaaaaaaaaaaaaaaaaaaaaaaaaaaaaaaaaaaaaaaaaaaaaaaaaaaaaaaaaaaaaaaaaaaaaaaaaaaaaaaaaaaaaaaaaaaaaaaaaaaaaaaaaaaaaaaaaaaaaaaaaaaaaaaaaaaaaaaaaaaaaaaaaaaaaaaaaaaaaaaaaaaaaaaaaaaaaaaaaaaaaaaaaaaaaaaaaaaaaaaaaaaaaaaaaaaaaaaaaaaaaaaaaaaaaaaaaaaaaaaaaaaaaaaaaaaaaaaaaaaaaaaaaaaaaaaaaaaaaaaaaaaaaaaaaaaaaaaaaaaaaaaaaaaaaaaaaaaaaaaaaaaaaaaaaaaaaaaaaaaaaaaaaaaaaaaaaaaaaaaaaaaaaaaaaaaaaaaaaaaaaaaaaaaaaaaaaaaaaaaaaaaaaaaaaaaaaaaaaaaaaaaaaaaaaaaaaaaaaaaaaaaaaaaaaaaaaaaaaaaaaaaaaaaaaaaaaaaaaaaaaaaaaaaaaaaaaaaaaaaaaaaaaaaaaaaaaaaaaaaaaaaaaaaaaaaaaaaaaaaaaaaaaaaaaaaaaaaaaaaaaaaaaaaaaaaaaaaaaaaaaaaaaaaaaaaaaaaaaaaaaaaaaaaaaaaaaaaaaaaaaaaaaaaaaaaaaaaaaaaaaaaaaaaaaaaaaaaaaaaaaaaaaaaaaaaaaaaaaaaaaaaaaaaaaaaaaaaaaaaaaaaaaaaaaaaaaaaaaaaaaaaaaaaaaaaaaaaaaaaaaaaaaaaaaaaaaaaaaaaaaaaaaaaaaaaaaaaaaaaaaaaaaaaaaaaaaaaaaaaaaaaaaaaaaaaaaaaaaaaaaaaaaaaaaaaaaaaaaaaaaaaaaaaaaaaaaaaaaaaaaaaaaaaaaaaaaaaaaaaaaaaaaaaaaaaaaaaaaaaaaaaaaaaaaaaaaaaaaaaaaaaaaaaaaaaaaaaaaaaaaaaaaaaaaaaaaaaaaaaaaaaaaaaaaaaaaaaaaaaaaaaaaaaaaaaaaaaaaaaaaaaaaaaaaaaaaaaaaaaaaaaaaaaaaaaaaaaaaaaaaaaaaaaaaaaaaaaaaaaaaaaaaaaaaaaaaaaaaaaaaaaaaaaaaaaaaaaaaaaaaaa

SEQ ID NO: 29-30 - skipped (2 entries)

SEQ ID NO: 31 - protein, 486 aa, synthetic construct
  REGION 1..486: note = source = /note="Description of Artificial Sequence: Synthetic polypeptide"
MALPVTALLLPLALLLHAARPEIVMTQSPATLSLSPGERATLSCRASQDISKYLNWYQQKPGQAPRLLIYHTSRLHSGIPARFSGSGSGTDYTLTISSLQPEDFAVYFCQQGNTLPYTFGQGTKLEIKGGGGSGGGGSGGGGSQVQLQESGPGLVKPSETLSLTCTVSGVSLPDYGVSWIRQPPGKGLEWIGVIWGSETTYYSSSLKSRVTISKDNSKNQVSLKLSSVTAADTAVYYCAKHYYYGGSYAMDYWGQGTLVTVSSTTTPAPRPPTPAPTIASQPLSLRPEACRPAAGGAVHTRGLDFACDIYIWAPLAGTCGVLLLSLVITLYCKRGRKKLLYIFKQPFMRPVQTTQEEDGCSCRFPEEEEGGCELRVKFSRSADAPAYKQGQNQLYNELNLGRREEYDVLDKRRGRDPEMGGKPRRKNPQEGLYNELQKDKMAEAYSEIGMKGERRRGKGHDGLYQGLSTATKDTYDALHMQALPPR

SEQ ID NO: 32 - protein, 486 aa, synthetic construct
  REGION 1..486: note = source = /note="Description of Artificial Sequence: Synthetic polypeptide"
MALPVTALLLPLALLLHAARPEIVMTQSPATLSLSPGERATLSCRASQDISKYLNWYQQKPGQAPRLLIYHTSRLHSGIPARFSGSGSGTDYTLTISSLQPEDFAVYFCQQGNTLPYTFGQGTKLEIKGGGGSGGGGSGGGGSQVQLQESGPGLVKPSETLSLTCTVSGVSLPDYGVSWIRQPPGKGLEWIGVIWGSETTYYQSSLKSRVTISKDNSKNQVSLKLSSVTAADTAVYYCAKHYYYGGSYAMDYWGQGTLVTVSSTTTPAPRPPTPAPTIASQPLSLRPEACRPAAGGAVHTRGLDFACDIYIWAPLAGTCGVLLLSLVITLYCKRGRKKLLYIFKQPFMRPVQTTQEEDGCSCRFPEEEEGGCELRVKFSRSADAPAYKQGQNQLYNELNLGRREEYDVLDKRRGRDPEMGGKPRRKNPQEGLYNELQKDKMAEAYSEIGMKGERRRGKGHDGLYQGLSTATKDTYDALHMQALPPR

SEQ ID NO: 33 - protein, 486 aa, synthetic construct
  REGION 1..486: note = source = /note="Description of Artificial Sequence: Synthetic polypeptide"
MALPVTALLLPLALLLHAARPQVQLQESGPGLVKPSETLSLTCTVSGVSLPDYGVSWIRQPPGKGLEWIGVIWGSETTYYSSSLKSRVTISKDNSKNQVSLKLSSVTAADTAVYYCAKHYYYGGSYAMDYWGQGTLVTVSSGGGGSGGGGSGGGGSEIVMTQSPATLSLSPGERATLSCRASQDISKYLNWYQQKPGQAPRLLIYHTSRLHSGIPARFSGSGSGTDYTLTISSLQPEDFAVYFCQQGNTLPYTFGQGTKLEIKTTTPAPRPPTPAPTIASQPLSLRPEACRPAAGGAVHTRGLDFACDIYIWAPLAGTCGVLLLSLVITLYCKRGRKKLLYIFKQPFMRPVQTTQEEDGCSCRFPEEEEGGCELRVKFSRSADAPAYKQGQNQLYNELNLGRREEYDVLDKRRGRDPEMGGKPRRKNPQEGLYNELQKDKMAEAYSEIGMKGERRRGKGHDGLYQGLSTATKDTYDALHMQALPPR

SEQ ID NO: 34 - protein, 486 aa, synthetic construct
  REGION 1..486: note = source = /note="Description of Artificial Sequence: Synthetic polypeptide"
MALPVTALLLPLALLLHAARPQVQLQESGPGLVKPSETLSLTCTVSGVSLPDYGVSWIRQPPGKGLEWIGVIWGSETTYYQSSLKSRVTISKDNSKNQVSLKLSSVTAADTAVYYCAKHYYYGGSYAMDYWGQGTLVTVSSGGGGSGGGGSGGGGSEIVMTQSPATLSLSPGERATLSCRASQDISKYLNWYQQKPGQAPRLLIYHTSRLHSGIPARFSGSGSGTDYTLTISSLQPEDFAVYFCQQGNTLPYTFGQGTKLEIKTTTPAPRPPTPAPTIASQPLSLRPEACRPAAGGAVHTRGLDFACDIYIWAPLAGTCGVLLLSLVITLYCKRGRKKLLYIFKQPFMRPVQTTQEEDGCSCRFPEEEEGGCELRVKFSRSADAPAYKQGQNQLYNELNLGRREEYDVLDKRRGRDPEMGGKPRRKNPQEGLYNELQKDKMAEAYSEIGMKGERRRGKGHDGLYQGLSTATKDTYDALHMQALPPR

SEQ ID NO: 35 - protein, 491 aa, synthetic construct
  REGION 1..491: note = source = /note="Description of Artificial Sequence: Synthetic polypeptide"
MALPVTALLLPLALLLHAARPEIVMTQSPATLSLSPGERATLSCRASQDISKYLNWYQQKPGQAPRLLIYHTSRLHSGIPARFSGSGSGTDYTLTISSLQPEDFAVYFCQQGNTLPYTFGQGTKLEIKGGGGSGGGGSGGGGSGGGGSQVQLQESGPGLVKPSETLSLTCTVSGVSLPDYGVSWIRQPPGKGLEWIGVIWGSETTYYSSSLKSRVTISKDNSKNQVSLKLSSVTAADTAVYYCAKHYYYGGSYAMDYWGQGTLVTVSSTTTPAPRPPTPAPTIASQPLSLRPEACRPAAGGAVHTRGLDFACDIYIWAPLAGTCGVLLLSLVITLYCKRGRKKLLYIFKQPFMRPVQTTQEEDGCSCRFPEEEEGGCELRVKFSRSADAPAYKQGQNQLYNELNLGRREEYDVLDKRRGRDPEMGGKPRRKNPQEGLYNELQKDKMAEAYSEIGMKGERRRGKGHDGLYQGLSTATKDTYDALHMQALPPR

SEQ ID NO: 36 - protein, 491 aa, synthetic construct
  REGION 1..491: note = source = /note="Description of Artificial Sequence: Synthetic polypeptide"
MALPVTALLLPLALLLHAARPEIVMTQSPATLSLSPGERATLSCRASQDISKYLNWYQQKPGQAPRLLIYHTSRLHSGIPARFSGSGSGTDYTLTISSLQPEDFAVYFCQQGNTLPYTFGQGTKLEIKGGGGSGGGGSGGGGSGGGGSQVQLQESGPGLVKPSETLSLTCTVSGVSLPDYGVSWIRQPPGKGLEWIGVIWGSETTYYQSSLKSRVTISKDNSKNQVSLKLSSVTAADTAVYYCAKHYYYGGSYAMDYWGQGTLVTVSSTTTPAPRPPTPAPTIASQPLSLRPEACRPAAGGAVHTRGLDFACDIYIWAPLAGTCGVLLLSLVITLYCKRGRKKLLYIFKQPFMRPVQTTQEEDGCSCRFPEEEEGGCELRVKFSRSADAPAYKQGQNQLYNELNLGRREEYDVLDKRRGRDPEMGGKPRRKNPQEGLYNELQKDKMAEAYSEIGMKGERRRGKGHDGLYQGLSTATKDTYDALHMQALPPR

SEQ ID NO: 37 - protein, 491 aa, synthetic construct
  REGION 1..491: note = source = /note="Description of Artificial Sequence: Synthetic polypeptide"
MALPVTALLLPLALLLHAARPQVQLQESGPGLVKPSETLSLTCTVSGVSLPDYGVSWIRQPPGKGLEWIGVIWGSETTYYSSSLKSRVTISKDNSKNQVSLKLSSVTAADTAVYYCAKHYYYGGSYAMDYWGQGTLVTVSSGGGGSGGGGSGGGGSGGGGSEIVMTQSPATLSLSPGERATLSCRASQDISKYLNWYQQKPGQAPRLLIYHTSRLHSGIPARFSGSGSGTDYTLTISSLQPEDFAVYFCQQGNTLPYTFGQGTKLEIKTTTPAPRPPTPAPTIASQPLSLRPEACRPAAGGAVHTRGLDFACDIYIWAPLAGTCGVLLLSLVITLYCKRGRKKLLYIFKQPFMRPVQTTQEEDGCSCRFPEEEEGGCELRVKFSRSADAPAYKQGQNQLYNELNLGRREEYDVLDKRRGRDPEMGGKPRRKNPQEGLYNELQKDKMAEAYSEIGMKGERRRGKGHDGLYQGLSTATKDTYDALHMQALPPR

SEQ ID NO: 38 - protein, 491 aa, synthetic construct
  REGION 1..491: note = source = /note="Description of Artificial Sequence: Synthetic polypeptide"
MALPVTALLLPLALLLHAARPQVQLQESGPGLVKPSETLSLTCTVSGVSLPDYGVSWIRQPPGKGLEWIGVIWGSETTYYQSSLKSRVTISKDNSKNQVSLKLSSVTAADTAVYYCAKHYYYGGSYAMDYWGQGTLVTVSSGGGGSGGGGSGGGGSGGGGSEIVMTQSPATLSLSPGERATLSCRASQDISKYLNWYQQKPGQAPRLLIYHTSRLHSGIPARFSGSGSGTDYTLTISSLQPEDFAVYFCQQGNTLPYTFGQGTKLEIKTTTPAPRPPTPAPTIASQPLSLRPEACRPAAGGAVHTRGLDFACDIYIWAPLAGTCGVLLLSLVITLYCKRGRKKLLYIFKQPFMRPVQTTQEEDGCSCRFPEEEEGGCELRVKFSRSADAPAYKQGQNQLYNELNLGRREEYDVLDKRRGRDPEMGGKPRRKNPQEGLYNELQKDKMAEAYSEIGMKGERRRGKGHDGLYQGLSTATKDTYDALHMQALPPR

SEQ ID NO: 39 - protein, 491 aa, synthetic construct
  REGION 1..491: note = source = /note="Description of Artificial Sequence: Synthetic polypeptide"
MALPVTALLLPLALLLHAARPEIVMTQSPATLSLSPGERATLSCRASQDISKYLNWYQQKPGQAPRLLIYHTSRLHSGIPARFSGSGSGTDYTLTISSLQPEDFAVYFCQQGNTLPYTFGQGTKLEIKGGGGSGGGGSGGGGSGGGGSQVQLQESGPGLVKPSETLSLTCTVSGVSLPDYGVSWIRQPPGKGLEWIGVIWGSETTYYNSSLKSRVTISKDNSKNQVSLKLSSVTAADTAVYYCAKHYYYGGSYAMDYWGQGTLVTVSSTTTPAPRPPTPAPTIASQPLSLRPEACRPAAGGAVHTRGLDFACDIYIWAPLAGTCGVLLLSLVITLYCKRGRKKLLYIFKQPFMRPVQTTQEEDGCSCRFPEEEEGGCELRVKFSRSADAPAYKQGQNQLYNELNLGRREEYDVLDKRRGRDPEMGGKPRRKNPQEGLYNELQKDKMAEAYSEIGMKGERRRGKGHDGLYQGLSTATKDTYDALHMQALPPR

SEQ ID NO: 40 - protein, 491 aa, synthetic construct; identical to SEQ ID NO: 39
  REGION 1..491: note = source = /note="Description of Artificial Sequence: Synthetic polypeptide"

SEQ ID NO: 41 - protein, 491 aa, synthetic construct
  REGION 1..491: note = source = /note="Description of Artificial Sequence: Synthetic polypeptide"
MALPVTALLLPLALLLHAARPQVQLQESGPGLVKPSETLSLTCTVSGVSLPDYGVSWIRQPPGKGLEWIGVIWGSETTYYNSSLKSRVTISKDNSKNQVSLKLSSVTAADTAVYYCAKHYYYGGSYAMDYWGQGTLVTVSSGGGGSGGGGSGGGGSGGGGSEIVMTQSPATLSLSPGERATLSCRASQDISKYLNWYQQKPGQAPRLLIYHTSRLHSGIPARFSGSGSGTDYTLTISSLQPEDFAVYFCQQGNTLPYTFGQGTKLEIKTTTPAPRPPTPAPTIASQPLSLRPEACRPAAGGAVHTRGLDFACDIYIWAPLAGTCGVLLLSLVITLYCKRGRKKLLYIFKQPFMRPVQTTQEEDGCSCRFPEEEEGGCELRVKFSRSADAPAYKQGQNQLYNELNLGRREEYDVLDKRRGRDPEMGGKPRRKNPQEGLYNELQKDKMAEAYSEIGMKGERRRGKGHDGLYQGLSTATKDTYDALHMQALPPR

SEQ ID NO: 42 - protein, 486 aa, synthetic construct
  REGION 1..486: note = source = /note="Description of Artificial Sequence: Synthetic polypeptide"
MALPVTALLLPLALLLHAARPEIVMTQSPATLSLSPGERATLSCRASQDISKYLNWYQQKPGQAPRLLIYHTSRLHSGIPARFSGSGSGTDYTLTISSLQPEDFAVYFCQQGNTLPYTFGQGTKLEIKGGGGSGGGGSGGGGSQVQLQESGPGLVKPSETLSLTCTVSGVSLPDYGVSWIRQPPGKGLEWIGVIWGSETTYYNSSLKSRVTISKDNSKNQVSLKLSSVTAADTAVYYCAKHYYYGGSYAMDYWGQGTLVTVSSTTTPAPRPPTPAPTIASQPLSLRPEACRPAAGGAVHTRGLDFACDIYIWAPLAGTCGVLLLSLVITLYCKRGRKKLLYIFKQPFMRPVQTTQEEDGCSCRFPEEEEGGCELRVKFSRSADAPAYKQGQNQLYNELNLGRREEYDVLDKRRGRDPEMGGKPRRKNPQEGLYNELQKDKMAEAYSEIGMKGERRRGKGHDGLYQGLSTATKDTYDALHMQALPPR

SEQ ID NO: 43 - protein, 112 aa, Homo sapiens
RVKFSRSADAPAYQQGQNQLYNELNLGRREEYDVLDKRRGRDPEMGGKPRRKNPQEGLYNELQKDKMAEAYSEIGMKGERRRGKGHDGLYQGLSTATKDTYDALHMQALPPR

SEQ ID NO: 44 - DNA, 336 bp, Homo sapiens
  source 1..336: mol_type = other DNA
agagtgaagttcagcaggagcgcagacgcccccgcgtaccagcagggccagaaccagctctataacgagctcaatctaggacgaagagaggagtacgatgttttggacaagagacgtggccgggaccctgagatggggggaaagccgagaaggaagaaccctcaggaaggcctgtacaatgaactgcagaaagataagatggcggaggcctacagtgagattgggatgaaaggcgagcgccggaggggcaaggggcacgatggcctttaccagggtctcagtacagccaccaaggacacctacgacgcccttcacatgcaggccctgccccctcgc

SEQ ID NO: 45 - protein, 230 aa, synthetic construct
  REGION 1..230: note = source = /note="Description of Artificial Sequence: Synthetic polypeptide"
ESKYGPPCPPCPAPEFLGGPSVFLFPPKPKDTLMISRTPEVTCVVVDVSQEDPEVQFNWYVDGVEVHNAKTKPREEQFNSTYRVVSVLTVLHQDWLNGKEYKCKVSNKGLPSSIEKTISKAKGQPREPQVYTLPPSQEEMTKNQVSLTCLVKGFYPSDIAVEWESNGQPENNYKTTPPVLDSDGSFFLYSRLTVDKSRWQEGNVFSCSVMHEALHNHYTQKSLSLSLGKM

SEQ ID NO: 46 - DNA, 690 bp, synthetic construct
  misc_feature 1..690: note = source = /note="Description of Artificial Sequence: Synthetic polynucleotide"
  source 1..690: mol_type = other DNA
gagagcaagtacggccctccctgccccccttgccctgcccccgagttcctgggcggacccagcgtgttcctgttcccccccaagcccaaggacaccctgatgatcagccggacccccgaggtgacctgtgtggtggtggacgtgtcccaggaggaccccgaggtccagttcaactggtacgtggacggcgtggaggtgcacaacgccaagaccaagccccgggaggagcagttcaatagcacctaccgggtggtgtccgtgctgaccgtgctgcaccaggactggctgaacggcaaggaatacaagtgtaaggtgtccaacaagggcctgcccagcagcatcgagaaaaccatcagcaaggccaagggccagcctcgggagccccaggtgtacaccctgccccctagccaagaggagatgaccaagaaccaggtgtccctgacctgcctggtgaagggcttctaccccagcgacatcgccgtggagtgggagagcaacggccagcccgagaacaactacaagaccaccccccctgtgctggacagcgacggcagcttcttcctgtacagccggctgaccgtggacaagagccggtggcaggagggcaacgtctttagctgctccgtgatgcacgaggccctgcacaaccactacacccagaagagcctgagcctgtccctgggcaagatg

SEQ ID NO: 47 - protein, 282 aa, synthetic construct
  REGION 1..282: note = source = /note="Description of Artificial Sequence: Synthetic polypeptide"
RWPESPKAQASSVPTAQPQAEGSLAKATTAPATTRNTGRGGEEKKKEKEKEEQEERETKTPECPSHTQPLGVYLLTPAVQDLWLRDKATFTCFVVGSDLKDAHLTWEVAGKVPTGGVEEGLLERHSNGSQSQHSRLTLPRSLWNAGTSVTCTLNHPSLPPQRLMALREPAAQAPVKLSLNLLASSDPPEAASWLLCEVSGFSPPNILLMWLEDQREVNTSGFAPARPPPQPGSTTFWAWSVLRVPAPPSPQPATYTCVVSHEDSRTLLNASRSLEVSYVTDH

SEQ ID NO: 48 - DNA, 847 bp, synthetic construct
  misc_feature 1..847: note = source = /note="Description of Artificial Sequence: Synthetic polynucleotide"
  source 1..847: mol_type = other DNA
aggtggcccgaaagtcccaaggcccaggcatctagtgttcctactgcacagccccaggcagaaggcagcctagccaaagctactactgcacctgccactacgcgcaatactggccgtggcggggaggagaagaaaaaggagaaagagaaagaagaacaggaagagagggagaccaagacccctgaatgtccatcccatacccagccgctgggcgtctatctcttgactcccgcagtacaggacttgtggcttagagataaggccacctttacatgtttcgtcgtgggctctgacctgaaggatgcccatttgacttgggaggttgccggaaaggtacccacagggggggttgaggaagggttgctggagcgccattccaatggctctcagagccagcactcaagactcacccttccgagatccctgtggaacgccgggacctctgtcacatgtactctaaatcatcctagcctgcccccacagcgtctgatggcccttagagagccagccgcccaggcaccagttaagcttagcctgaatctgctcgccagtagtgatcccccagaggccgccagctggctcttatgcgaagtgtccggctttagcccgcccaacatcttgctcatgtggctggaggaccagcgagaagtgaacaccagcggcttcgctccagcccggcccccaccccagccgggttctaccacattctgggcctggagtgtcttaagggtcccagcaccacctagcccccagccagccacatacacctgtgttgtgtcccatgaagatagcaggaccctgctaaatgcttctaggagtctggaggtttcctacgtgactgaccatt

SEQ ID NO: 49 - protein, 10 aa, synthetic construct
  REGION 1..10: note = source = /note="Description of Artificial Sequence: Synthetic peptide"
GGGGSGGGGS

SEQ ID NO: 50 - DNA, 30 bp, synthetic construct
  misc_feature 1..30: note = source = /note="Description of Artificial Sequence: Synthetic oligonucleotide"
  source 1..30: mol_type = other DNA
ggtggcggaggttctggaggtggaggttcc

SEQ ID NO: 51 - protein, 48 aa, synthetic construct
  REGION 1..48: note = source = /note="Description of Artificial Sequence: Synthetic polypeptide"
QRRKYRSNKGESPVEPAEPCRYSCPREEEGSTIPIQEDYRKPEPACSP

SEQ ID NO: 52 - DNA, 123 bp, synthetic construct
  misc_feature 1..123: note = source = /note="Description of Artificial Sequence: Synthetic polynucleotide"
  source 1..123: mol_type = other DNA
aggagtaagaggagcaggctcctgcacagtgactacatgaacatgactccccgccgccccgggcccacccgcaagcattaccagccctatgccccaccacgcgacttcgcagcctatcgctcc

SEQ ID NO: 53 - protein, 30 aa, synthetic construct
  REGION 1..30: note = MISC_FEATURE - /note="This sequence may encompass 1-6 'Gly-Gly-Gly-Gly-Ser' repeating units"
  REGION 1..30: note = source = /note="Description of Artificial Sequence: Synthetic polypeptide"
GGGGSGGGGSGGGGSGGGGSGGGGSGGGGS

SEQ ID NO: 54 - DNA, 63 bp, synthetic construct
  misc_feature 1..63: note = source = /note="Description of Artificial Sequence: Synthetic oligonucleotide"
  source 1..63: mol_type = other DNA
atggccctgcctgtgacagccctgctgctgcctctggctctgctgctgcatgccgctagaccc

SEQ ID NO: 55 - DNA, 135 bp, synthetic construct
  misc_feature 1..135: note = source = /note="Description of Artificial Sequence: Synthetic polynucleotide"
  source 1..135: mol_type = other DNA
accacgacgccagcgccgcgaccaccaacaccggcgcccaccatcgcgtcgcagcccctgtccctgcgcccagaggcgtgccggccagcggcggggggcgcagtgcacacgagggggctggacttcgcctgtgat

SEQ ID NO: 56 - DNA, 72 bp, synthetic construct
  misc_feature 1..72: note = source = /note="Description of Artificial Sequence: Synthetic oligonucleotide"
  source 1..72: mol_type = other DNA
atctacatctgggcgcccttggccgggacttgtggggtccttctcctgtcactggttatcaccctttactgc

SEQ ID NO: 57 - skipped

SEQ ID NO: 58 - protein, 486 aa, synthetic construct
  REGION 1..486: note = source = /note="Description of Artificial Sequence: Synthetic polypeptide"
MALPVTALLLPLALLLHAARPDIQMTQTTSSLSASLGDRVTISCRASQDISKYLNWYQQKPDGTVKLLIYHTSRLHSGVPSRFSGSGSGTDYSLTISNLEQEDIATYFCQQGNTLPYTFGGGTKLEITGGGGSGGGGSGGGGSEVKLQESGPGLVAPSQSLSVTCTVSGVSLPDYGVSWIRQPPRKGLEWLGVIWGSETTYYNSALKSRLTIIKDNSKSQVFLKMNSLQTDDTAIYYCAKHYYYGGSYAMDYWGQGTSVTVSSTTTPAPRPPTPAPTIASQPLSLRPEACRPAAGGAVHTRGLDFACDIYIWAPLAGTCGVLLLSLVITLYCKRGRKKLLYIFKQPFMRPVQTTQEEDGCSCRFPEEEEGGCELRVKFSRSADAPAYKQGQNQLYNELNLGRREEYDVLDKRRGRDPEMGGKPRRKNPQEGLYNELQKDKMAEAYSEIGMKGERRRGKGHDGLYQGLSTATKDTYDALHMQALPPR

SEQ ID NO: 59 - protein, 242 aa, synthetic construct
  REGION 1..242: note = source = /note="Description of Artificial Sequence: Synthetic polypeptide"
DIQMTQTTSSLSASLGDRVTISCRASQDISKYLNWYQQKPDGTVKLLIYHTSRLHSGVPSRFSGSGSGTDYSLTISNLEQEDIATYFCQQGNTLPYTFGGGTKLEITGGGGSGGGGSGGGGSEVKLQESGPGLVAPSQSLSVTCTVSGVSLPDYGVSWIRQPPRKGLEWLGVIWGSETTYYNSALKSRLTIIKDNSKSQVFLKMNSLQTDDTAIYYCAKHYYYGGSYAMDYWGQGTSVTVSS

SEQ ID NO: 60 - DNA, 126 bp, synthetic construct
  misc_feature 1..126: note = source = /note="Description of Artificial Sequence: Synthetic polynucleotide"
  source 1..126: mol_type = other DNA
aaacggggcagaaagaaactcctgtatatattcaaacaaccatttatgagaccagtacaaactactcaagaggaagatggctgtagctgccgatttccagaagaagaagaaggaggatgtgaactg

SEQ ID NO: 61 - DNA, 813 bp, synthetic construct
  misc_feature 1..813: note = source = /note="Description of Artificial Sequence: Synthetic polynucleotide"
  source 1..813: mol_type = other DNA
atggccctccctgtcaccgccctgctgcttccgctggctcttctgctccacgccgctcggcccgaaattgtgatgacccagtcacccgccactcttagcctttcacccggtgagcgcgcaaccctgtcttgcagagcctcccaagacatctcaaaataccttaattggtatcaacagaagcccggacaggctcctcgccttctgatctaccacaccagccggctccattctggaatccctgccaggttcagcggtagcggatctgggaccgactacaccctcactatcagctcactgcagccagaggacttcgctgtctatttctgtcagcaagggaacaccctgccctacacctttggacagggcaccaagctcgagattaaaggtggaggtggcagcggaggaggtgggtccggcggtggaggaagccaggtccaactccaagaaagcggaccgggtcttgtgaagccatcagaaactctttcactgacttgtactgtgagcggagtgtctctccccgattacggggtgtcttggatcagacagccaccggggaagggtctggaatggattggagtgatttggggctctgagactacttactactcttcatccctcaagtcacgcgtcaccatctcaaaggacaactctaagaatcaggtgtcactgaaactgtcatctgtgaccgcagccgacaccgccgtgtactattgcgctaagcattactattatggcgggagctacgcaatggattactggggacagggtactctggtcaccgtgtccagccaccaccatcatcaccatcaccat

SEQ ID NO: 62 - DNA, 813 bp, synthetic construct
  misc_feature 1..813: note = source = /note="Description of Artificial Sequence: Synthetic polynucleotide"
  source 1..813: mol_type = other DNA
atggccctccctgtcaccgccctgctgcttccgctggctcttctgctccacgccgctcggcccgaaattgtgatgacccagtcacccgccactcttagcctttcacccggtgagcgcgcaaccctgtcttgcagagcctcccaagacatctcaaaataccttaattggtatcaacagaagcccggacaggctcctcgccttctgatctaccacaccagccggctccattctggaatccctgccaggttcagcggtagcggatctgggaccgactacaccctcactatcagctcactgcagccagaggacttcgctgtctatttctgtcagcaagggaacaccctgccctacacctttggacagggcaccaagctcgagattaaaggtggaggtggcagcggaggaggtgggtccggcggtggaggaagccaggtccaactccaagaaagcggaccgggtcttgtgaagccatcagaaactctttcactgacttgtactgtgagcggagtgtctctccccgattacggggtgtcttggatcagacagccaccggggaagggtctggaatggattggagtgatttggggctctgagactacttactaccaatcatccctcaagtcacgcgtcaccatctcaaaggacaactctaagaatcaggtgtcactgaaactgtcatctgtgaccgcagccgacaccgccgtgtactattgcgctaagcattactattatggcgggagctacgcaatggattactggggacagggtactctggtcaccgtgtccagccaccaccatcatcaccatcaccat

SEQ ID NO: 63 - DNA, 813 bp, synthetic construct
  misc_feature 1..813: note = source = /note="Description of Artificial Sequence: Synthetic polynucleotide"
  source 1..813: mol_type = other DNA
atggctctgcccgtgaccgcactcctcctgccactggctctgctgcttcacgccgctcgcccacaagtccagcttcaagaatcagggcctggtctggtgaagccatctgagactctgtccctcacttgcaccgtgagcggagtgtccctcccagactacggagtgagctggattagacagcctcccggaaagggactggagtggatcggagtgatttggggtagcgaaaccacttactattcatcttccctgaagtcacgggtcaccatttcaaaggataactcaaagaatcaagtgagcctcaagctctcatcagtcaccgccgctgacaccgccgtgtattactgtgccaagcattactactatggagggtcctacgccatggactactggggccagggaactctggtcactgtgtcatctggtggaggaggtagcggaggaggcgggagcggtggaggtggctccgaaatcgtgatgacccagagccctgcaaccctgtccctttctcccggggaacgggctaccctttcttgtcgggcatcacaagatatctcaaaatacctcaattggtatcaacagaagccgggacaggcccctaggcttcttatctaccacacctctcgcctgcatagcgggattcccgcacgctttagcgggtctggaagcgggaccgactacactctgaccatctcatctctccagcccgaggacttcgccgtctacttctgccagcagggtaacaccctgccgtacaccttcggccagggcaccaagcttgagatcaaacatcaccaccatcatcaccatcac

SEQ ID NO: 64 - DNA, 813 bp, synthetic construct
  misc_feature 1..813: note = source = /note="Description of Artificial Sequence: Synthetic polynucleotide"
  source 1..813: mol_type = other DNA
atggctctgcccgtgaccgcactcctcctgccactggctctgctgcttcacgccgctcgcccacaagtccagcttcaagaatcagggcctggtctggtgaagccatctgagactctgtccctcacttgcaccgtgagcggagtgtccctcccagactacggagtgagctggattagacagcctcccggaaagggactggagtggatcggagtgatttggggtagcgaaaccacttactatcaatcttccctgaagtcacgggtcaccatttcaaaggataactcaaagaatcaagtgagcctcaagctctcatcagtcaccgccgctgacaccgccgtgtattactgtgccaagcattactactatggagggtcctacgccatggactactggggccagggaactctggtcactgtgtcatctggtggaggaggtagcggaggaggcgggagcggtggaggtggctccgaaatcgtgatgacccagagccctgcaaccctgtccctttctcccggggaacgggctaccctttcttgtcgggcatcacaagatatctcaaaatacctcaattggtatcaacagaagccgggacaggcccctaggcttcttatctaccacacctctcgcctgcatagcgggattcccgcacgctttagcgggtctggaagcgggaccgactacactctgaccatctcatctctccagcccgaggacttcgccgtctacttctgccagcagggtaacaccctgccgtacaccttcggccagggcaccaagcttgagatcaaacatcaccaccatcatcaccatcac

SEQ ID NO: 65 - DNA, 828 bp, synthetic construct
  misc_feature 1..828: note = source = /note="Description of Artificial Sequence: Synthetic polynucleotide"
  source 1..828: mol_type = other DNA
atggccctcccagtgaccgctctgctgctgcctctcgcacttcttctccatgccgctcggcctgagatcgtcatgacccaaagccccgctaccctgtccctgtcacccggcgagagggcaaccctttcatgcagggccagccaggacatttctaagtacctcaactggtatcagcagaagccagggcaggctcctcgcctgctgatctaccacaccagccgcctccacagcggtatccccgccagattttccgggagcgggtctggaaccgactacaccctcaccatctcttctctgcagcccgaggatttcgccgtctatttctgccagcaggggaatactctgccgtacaccttcggtcaaggtaccaagctggaaatcaagggaggcggaggatcaggcggtggcggaagcggaggaggtggctccggaggaggaggttcccaagtgcagcttcaagaatcaggacccggacttgtgaagccatcagaaaccctctccctgacttgtaccgtgtccggtgtgagcctccccgactacggagtctcttggattcgccagcctccggggaagggtcttgaatggattggggtgatttggggatcagagactacttactactcttcatcacttaagtcacgggtcaccatcagcaaagataatagcaagaaccaagtgtcacttaagctgtcatctgtgaccgccgctgacaccgccgtgtactattgtgccaaacattactattacggagggtcttatgctatggactactggggacaggggaccctggtgactgtctctagccatcaccatcaccaccatcatcac

SEQ ID NO: 66 - DNA, 828 bp, synthetic construct
  misc_feature 1..828: note = source = /note="Description of Artificial Sequence: Synthetic polynucleotide"
  source 1..828: mol_type = other DNA
atggccctcccagtgaccgctctgctgctgcctctcgcacttcttctccatgccgctcggcctgagatcgtcatgacccaaagccccgctaccctgtccctgtcacccggcgagagggcaaccctttcatgcagggccagccaggacatttctaagtacctcaactggtatcagcagaagccagggcaggctcctcgcctgctgatctaccacaccagccgcctccacagcggtatccccgccagattttccgggagcgggtctggaaccgactacaccctcaccatctcttctctgcagcccgaggatttcgccgtctatttctgccagcaggggaatactctgccgtacaccttcggtcaaggtaccaagctggaaatcaagggaggcggaggatcaggcggtggcggaagcggaggaggtggctccggaggaggaggttcccaagtgcagcttcaagaatcaggacccggacttgtgaagccatcagaaaccctctccctgacttgtaccgtgtccggtgtgagcctccccgactacggagtctcttggattcgccagcctccggggaagggtcttgaatggattggggtgatttggggatcagagactacttactaccagtcatcacttaagtcacgggtcaccatcagcaaagataatagcaagaaccaagtgtcacttaagctgtcatctgtgaccgccgctgacaccgccgtgtactattgtgccaaacattactattacggagggtcttatgctatggactactggggacaggggaccctggtgactgtctctagccatcaccatcaccaccatcatcac

SEQ ID NO: 67 - DNA, 828 bp, synthetic construct
  misc_feature 1..828: note = source = /note="Description of Artificial Sequence: Synthetic polynucleotide"
  source 1..828: mol_type = other DNA
atggcactgcctgtcactgccctcctgctgcctctggccctccttctgcatgccgccaggccccaagtccagctgcaagagtcaggacccggactggtgaagccgtctgagactctctcactgacttgtaccgtcagcggcgtgtccctccccgactacggagtgtcatggatccgccaacctcccgggaaagggcttgaatggattggtgtcatctggggttctgaaaccacctactactcatcttccctgaagtccagggtgaccatcagcaaggataattccaagaaccaggtcagccttaagctgtcatctgtgaccgctgctgacaccgccgtgtattactgcgccaagcactactattacggaggaagctacgctatggactattggggacagggcactctcgtgactgtgagcagcggcggtggagggtctggaggtggaggatccggtggtggtgggtcaggcggaggagggagcgagattgtgatgactcagtcaccagccaccctttctctttcacccggcgagagagcaaccctgagctgtagagccagccaggacatttctaagtacctcaactggtatcagcaaaaaccggggcaggcccctcgcctcctgatctaccatacctcacgccttcactctggtatccccgctcggtttagcggatcaggatctggtaccgactacactctgaccatttccagcctgcagccagaagatttcgcagtgtatttctgccagcagggcaatacccttccttacaccttcggtcagggaaccaagctcgaaatcaagcaccatcaccatcatcaccaccat

SEQ ID NO: 68 - DNA, 828 bp, synthetic construct
  misc_feature 1..828: note = source = /note="Description of Artificial Sequence: Synthetic polynucleotide"
  source 1..828: mol_type = other DNA
atggcactgcctgtcactgccctcctgctgcctctggccctccttctgcatgccgccaggccccaagtccagctgcaagagtcaggacccggactggtgaagccgtctgagactctctcactgacttgtaccgtcagcggcgtgtccctccccgactacggagtgtcatggatccgccaacctcccgggaaagggcttgaatggattggtgtcatctggggttctgaaaccacctactaccagtcttccctgaagtccagggtgaccatcagcaaggataattccaagaaccaggtcagccttaagctgtcatctgtgaccgctgctgacaccgccgtgtattactgcgccaagcactactattacggaggaagctacgctatggactattggggacagggcactctcgtgactgtgagcagcggcggtggagggtctggaggtggaggatccggtggtggtgggtcaggcggaggagggagcgagattgtgatgactcagtcaccagccaccctttctctttcacccggcgagagagcaaccctgagctgtagagccagccaggacatttctaagtacctcaactggtatcagcaaaaaccggggcaggcccctcgcctcctgatctaccatacctcacgccttcactctggtatccccgctcggtttagcggatcaggatctggtaccgactacactctgaccatttccagcctgcagccagaagatttcgcagtgtatttctgccagcagggcaatacccttccttacaccttcggtcagggaaccaagctcgaaatcaagcaccatcaccatcatcatcaccac

SEQ ID NO: 69 - DNA, 828 bp, synthetic construct
  misc_feature 1..828: note = source = /note="Description of Artificial Sequence: Synthetic polynucleotide"
  source 1..828: mol_type = other DNA
atggccctcccagtgaccgctctgctgctgcctctcgcacttcttctccatgccgctcggcctgagatcgtcatgacccaaagccccgctaccctgtccctgtcacccggcgagagggcaaccctttcatgcagggccagccaggacatttctaagtacctcaactggtatcagcagaagccagggcaggctcctcgcctgctgatctaccacaccagccgcctccacagcggtatccccgccagattttccgggagcgggtctggaaccgactacaccctcaccatctcttctctgcagcccgaggatttcgccgtctatttctgccagcaggggaatactctgccgtacaccttcggtcaaggtaccaagctggaaatcaagggaggcggaggatcaggcggtggcggaagcggaggaggtggctccggaggaggaggttcccaagtgcagcttcaagaatcaggacccggacttgtgaagccatcagaaaccctctccctgacttgtaccgtgtccggtgtgagcctccccgactacggagtctcttggattcgccagcctccggggaagggtcttgaatggattggggtgatttggggatcagagactacttactacaattcatcacttaagtcacgggtcaccatcagcaaagataatagcaagaaccaagtgtcacttaagctgtcatctgtgaccgccgctgacaccgccgtgtactattgtgccaaacattactattacggagggtcttatgctatggactactggggacaggggaccctggtgactgtctctagccatcaccatcaccaccatcatcac

SEQ ID NO: 70 - DNA, 828 bp, synthetic construct
  misc_feature 1..828: note = source = /note="Description of Artificial Sequence: Synthetic polynucleotide"
  source 1..828: mol_type = other DNA
atggcactgcctgtcactgccctcctgctgcctctggccctccttctgcatgccgccaggccccaagtccagctgcaagagtcaggacccggactggtgaagccgtctgagactctctcactgacttgtaccgtcagcggcgtgtccctccccgactacggagtgtcatggatccgccaacctcccgggaaagggcttgaatggattggtgtcatctggggttctgaaaccacctactacaactcttccctgaagtccagggtgaccatcagcaaggataattccaagaaccaggtcagccttaagctgtcatctgtgaccgctgctgacaccgccgtgtattactgcgccaagcactactattacggaggaagctacgctatggactattggggacagggcactctcgtgactgtgagcagcggcggtggagggtctggaggtggaggatccggtggtggtgggtcaggcggaggagggagcgagattgtgatgactcagtcaccagccaccctttctctttcacccggcgagagagcaaccctgagctgtagagccagccaggacatttctaagtacctcaactggtatcagcaaaaaccggggcaggcccctcgcctcctgatctaccatacctcacgccttcactctggtatccccgctcggtttagcggatcaggatctggtaccgactacactctgaccatttccagcctgcagccagaagatttcgcagtgtatttctgccagcagggcaatacccttccttacaccttcggtcagggaaccaagctcgaaatcaagcaccatcaccatcatcaccaccat

SEQ ID NO: 71 - DNA, 813 bp, synthetic construct
  misc_feature 1..813: note = source = /note="Description of Artificial Sequence: Synthetic polynucleotide"
  source 1..813: mol_type = other DNA
atggccctccctgtcaccgccctgctgcttccgctggctcttctgctccacgccgctcggcccgaaattgtgatgacccagtcacccgccactcttagcctttcacccggtgagcgcgcaaccctgtcttgcagagcctcccaagacatctcaaaataccttaattggtatcaacagaagcccggacaggctcctcgccttctgatctaccacaccagccggctccattctggaatccctgccaggttcagcggtagcggatctgggaccgactacaccctcactatcagctcactgcagccagaggacttcgctgtctatttctgtcagcaagggaacaccctgccctacacctttggacagggcaccaagctcgagattaaaggtggaggtggcagcggaggaggtgggtccggcggtggaggaagccaggtccaactccaagaaagcggaccgggtcttgtgaagccatcagaaactctttcactgacttgtactgtgagcggagtgtctctccccgattacggggtgtcttggatcagacagccaccggggaagggtctggaatggattggagtgatttggggctctgagactacttactacaattcatccctcaagtcacgcgtcaccatctcaaaggacaactctaagaatcaggtgtcactgaaactgtcatctgtgaccgcagccgacaccgccgtgtactattgcgctaagcattactattatggcgggagctacgcaatggattactggggacagggtactctggtcaccgtgtccagccaccaccatcatcaccatcaccat

SEQ ID NO: 72 - DNA, 813 bp, synthetic construct
  misc_feature 1..813: note = source = /note="Description of Artificial Sequence: Synthetic polynucleotide"
  source 1..813: mol_type = other DNA
atggctctgcccgtgaccgcactcctcctgccactggctctgctgcttcacgccgctcgcccacaagtccagcttcaagaatcagggcctggtctggtgaagccatctgagactctgtccctcacttgcaccgtgagcggagtgtccctcccagactacggagtgagctggattagacagcctcccggaaagggactggagtggatcggagtgatttggggtagcgaaaccacttactataactcttccctgaagtcacgggtcaccatttcaaaggataactcaaagaatcaagtgagcctcaagctctcatcagtcaccgccgctgacaccgccgtgtattactgtgccaagcattactactatggagggtcctacgccatggactactggggccagggaactctggtcactgtgtcatctggtggaggaggtagcggaggaggcgggagcggtggaggtggctccgaaatcgtgatgacccagagccctgcaaccctgtccctttctcccggggaacgggctaccctttcttgtcgggcatcacaagatatctcaaaatacctcaattggtatcaacagaagccgggacaggcccctaggcttcttatctaccacacctctcgcctgcatagcgggattcccgcacgctttagcgggtctggaagcgggaccgactacactctgaccatctcatctctccagcccgaggacttcgccgtctacttctgccagcagggtaacaccctgccgtacaccttcggccagggcaccaagcttgagatcaaacatcaccaccatcatcaccatcac

SEQ ID NO: 73 - protein, 271 aa, synthetic construct
  REGION 1..271: note = source = /note="Description of Artificial Sequence: Synthetic polypeptide"
MALPVTALLLPLALLLHAARPEIVMTQSPATLSLSPGERATLSCRASQDISKYLNWYQQKPGQAPRLLIYHTSRLHSGIPARFSGSGSGTDYTLTISSLQPEDFAVYFCQQGNTLPYTFGQGTKLEIKGGGGSGGGGSGGGGSQVQLQESGPGLVKPSETLSLTCTVSGVSLPDYGVSWIRQPPGKGLEWIGVIWGSETTYYSSSLKSRVTISKDNSKNQVSLKLSSVTAADTAVYYCAKHYYYGGSYAMDYWGQGTLVTVSSHHHHHHHH

SEQ ID NO: 74 - protein, 271 aa, synthetic construct
  REGION 1..271: note = source = /note="Description of Artificial Sequence: Synthetic polypeptide"
MALPVTALLLPLALLLHAARPEIVMTQSPATLSLSPGERATLSCRASQDISKYLNWYQQKPGQAPRLLIYHTSRLHSGIPARFSGSGSGTDYTLTISSLQPEDFAVYFCQQGNTLPYTFGQGTKLEIKGGGGSGGGGSGGGGSQVQLQESGPGLVKPSETLSLTCTVSGVSLPDYGVSWIRQPPGKGLEWIGVIWGSETTYYQSSLKSRVTISKDNSKNQVSLKLSSVTAADTAVYYCAKHYYYGGSYAMDYWGQGTLVTVSSHHHHHHHH

SEQ ID NO: 75 - protein, 271 aa, synthetic construct
  REGION 1..271: note = source = /note="Description of Artificial Sequence: Synthetic polypeptide"
MALPVTALLLPLALLLHAARPQVQLQESGPGLVKPSETLSLTCTVSGVSLPDYGVSWIRQPPGKGLEWIGVIWGSETTYYSSSLKSRVTISKDNSKNQVSLKLSSVTAADTAVYYCAKHYYYGGSYAMDYWGQGTLVTVSSGGGGSGGGGSGGGGSEIVMTQSPATLSLSPGERATLSCRASQDISKYLNWYQQKPGQAPRLLIYHTSRLHSGIPARFSGSGSGTDYTLTISSLQPEDFAVYFCQQGNTLPYTFGQGTKLEIKHHHHHHHH

SEQ ID NO: 76 - protein, 271 aa, synthetic construct
  REGION 1..271: note = source = /note="Description of Artificial Sequence: Synthetic polypeptide"
MALPVTALLLPLALLLHAARPQVQLQESGPGLVKPSETLSLTCTVSGVSLPDYGVSWIRQPPGKGLEWIGVIWGSETTYYQSSLKSRVTISKDNSKNQVSLKLSSVTAADTAVYYCAKHYYYGGSYAMDYWGQGTLVTVSSGGGGSGGGGSGGGGSEIVMTQSPATLSLSPGERATLSCRASQDISKYLNWYQQKPGQAPRLLIYHTSRLHSGIPARFSGSGSGTDYTLTISSLQPEDFAVYFCQQGNTLPYTFGQGTKLEIKHHHHHHHH

SEQ ID NO: 77 - protein, 276 aa, synthetic construct
  REGION 1..276: note = source = /note="Description of Artificial Sequence: Synthetic polypeptide"
MALPVTALLLPLALLLHAARPEIVMTQSPATLSLSPGERATLSCRASQDISKYLNWYQQKPGQAPRLLIYHTSRLHSGIPARFSGSGSGTDYTLTISSLQPEDFAVYFCQQGNTLPYTFGQGTKLEIKGGGGSGGGGSGGGGSGGGGSQVQLQESGPGLVKPSETLSLTCTVSGVSLPDYGVSWIRQPPGKGLEWIGVIWGSETTYYSSSLKSRVTISKDNSKNQVSLKLSSVTAADTAVYYCAKHYYYGGSYAMDYWGQGTLVTVSSHHHHHHHH

SEQ ID NO: 78 - protein, 276 aa, synthetic construct
  REGION 1..276: note = source = /note="Description of Artificial Sequence: Synthetic polypeptide"
MALPVTALLLPLALLLHAARPEIVMTQSPATLSLSPGERATLSCRASQDISKYLNWYQQKPGQAPRLLIYHTSRLHSGIPARFSGSGSGTDYTLTISSLQPEDFAVYFCQQGNTLPYTFGQGTKLEIKGGGGSGGGGSGGGGSGGGGSQVQLQESGPGLVKPSETLSLTCTVSGVSLPDYGVSWIRQPPGKGLEWIGVIWGSETTYYQSSLKSRVTISKDNSKNQVSLKLSSVTAADTAVYYCAKHYYYGGSYAMDYWGQGTLVTVSSHHHHHHHH

SEQ ID NO: 79 - protein, 276 aa, synthetic construct
  REGION 1..276: note = source = /note="Description of Artificial Sequence: Synthetic polypeptide"
MALPVTALLLPLALLLHAARPQVQLQESGPGLVKPSETLSLTCTVSGVSLPDYGVSWIRQPPGKGLEWIGVIWGSETTYYSSSLKSRVTISKDNSKNQVSLKLSSVTAADTAVYYCAKHYYYGGSYAMDYWGQGTLVTVSSGGGGSGGGGSGGGGSGGGGSEIVMTQSPATLSLSPGERATLSCRASQDISKYLNWYQQKPGQAPRLLIYHTSRLHSGIPARFSGSGSGTDYTLTISSLQPEDFAVYFCQQGNTLPYTFGQGTKLEIKHHHHHHHH

SEQ ID NO: 80 - protein, 276 aa, synthetic construct
  REGION 1..276: note = source = /note="Description of Artificial Sequence: Synthetic polypeptide"
MALPVTALLLPLALLLHAARPQVQLQESGPGLVKPSETLSLTCTVSGVSLPDYGVSWIRQPPGKGLEWIGVIWGSETTYYQSSLKSRVTISKDNSKNQVSLKLSSVTAADTAVYYCAKHYYYGGSYAMDYWGQGTLVTVSSGGGGSGGGGSGGGGSGGGGSEIVMTQSPATLSLSPGERATLSCRASQDISKYLNWYQQKPGQAPRLLIYHTSRLHSGIPARFSGSGSGTDYTLTISSLQPEDFAVYFCQQGNTLPYTFGQGTKLEIKHHHHHHHH

SEQ ID NO: 81 - protein, 276 aa, synthetic construct
  REGION 1..276: note = source = /note="Description of Artificial Sequence: Synthetic polypeptide"
MALPVTALLLPLALLLHAARPEIVMTQSPATLSLSPGERATLSCRASQDISKYLNWYQQKPGQAPRLLIYHTSRLHSGIPARFSGSGSGTDYTLTISSLQPEDFAVYFCQQGNTLPYTFGQGTKLEIKGGGGSGGGGSGGGGSGGGGSQVQLQESGPGLVKPSETLSLTCTVSGVSLPDYGVSWIRQPPGKGLEWIGVIWGSETTYYNSSLKSRVTISKDNSKNQVSLKLSSVTAADTAVYYCAKHYYYGGSYAMDYWGQGTLVTVSSHHHHHHHH

SEQ ID NO: 82 - protein, 276 aa, synthetic construct
  REGION 1..276: note = source = /note="Description of Artificial Sequence: Synthetic polypeptide"
MALPVTALLLPLALLLHAARPQVQLQESGPGLVKPSETLSLTCTVSGVSLPDYGVSWIRQPPGKGLEWIGVIWGSETTYYNSSLKSRVTISKDNSKNQVSLKLSSVTAADTAVYYCAKHYYYGGSYAMDYWGQGTLVTVSSGGGGSGGGGSGGGGSGGGGSEIVMTQSPATLSLSPGERATLSCRASQDISKYLNWYQQKPGQAPRLLIYHTSRLHSGIPARFSGSGSGTDYTLTISSLQPEDFAVYFCQQGNTLPYTFGQGTKLEIKHHHHHHHH

SEQ ID NO: 83 - protein, 271 aa, synthetic construct
  REGION 1..271: note = source = /note="Description of Artificial Sequence: Synthetic polypeptide"
MALPVTALLLPLALLLHAARPEIVMTQSPATLSLSPGERATLSCRASQDISKYLNWYQQKPGQAPRLLIYHTSRLHSGIPARFSGSGSGTDYTLTISSLQPEDFAVYFCQQGNTLPYTFGQGTKLEIKGGGGSGGGGSGGGGSQVQLQESGPGLVKPSETLSLTCTVSGVSLPDYGVSWIRQPPGKGLEWIGVIWGSETTYYNSSLKSRVTISKDNSKNQVSLKLSSVTAADTAVYYCAKHYYYGGSYAMDYWGQGTLVTVSSHHHHHHHH

SEQ ID NO: 84 - protein, 271 aa, synthetic construct
  REGION 1..271: note = source = /note="Description of Artificial Sequence: Synthetic polypeptide"
MALPVTALLLPLALLLHAARPQVQLQESGPGLVKPSETLSLTCTVSGVSLPDYGVSWIRQPPGKGLEWIGVIWGSETTYYNSSLKSRVTISKDNSKNQVSLKLSSVTAADTAVYYCAKHYYYGGSYAMDYWGQGTLVTVSSGGGGSGGGGSGGGGSEIVMTQSPATLSLSPGERATLSCRASQDISKYLNWYQQKPGQAPRLLIYHTSRLHSGIPARFSGSGSGTDYTLTISSLQPEDFAVYFCQQGNTLPYTFGQGTKLEIKHHHHHHHH

SEQ ID NO: 85 - DNA, 1458 bp, synthetic construct
  misc_feature 1..1458: note = source = /note="Description of Artificial Sequence: Synthetic polynucleotide"
  source 1..1458: mol_type = other DNA
atggccctccctgtcaccgccctgctgcttccgctggctcttctgctccacgccgctcggcccgaaattgtgatgacccagtcacccgccactcttagcctttcacccggtgagcgcgcaaccctgtcttgcagagcctcccaagacatctcaaaataccttaattggtatcaacagaagcccggacaggctcctcgccttctgatctaccacaccagccggctccattctggaatccctgccaggttcagcggtagcggatctgggaccgactacaccctcactatcagctcactgcagccagaggacttcgctgtctatttctgtcagcaagggaacaccctgccctacacctttggacagggcaccaagctcgagattaaaggtggaggtggcagcggaggaggtgggtccggcggtggaggaagccaggtccaactccaagaaagcggaccgggtcttgtgaagccatcagaaactctttcactgacttgtactgtgagcggagtgtctctccccgattacggggtgtcttggatcagacagccaccggggaagggtctggaatggattggagtgatttggggctctgagactacttactactcttcatccctcaagtcacgcgtcaccatctcaaaggacaactctaagaatcaggtgtcactgaaactgtcatctgtgaccgcagccgacaccgccgtgtactattgcgctaagcattactattatggcgggagctacgcaatggattactggggacagggtactctggtcaccgtgtccagcaccactaccccagcaccgaggccacccaccccggctcctaccatcgcctcccagcctctgtccctgcgtccggaggcatgtagacccgcagctggtggggccgtgcatacccggggtcttgacttcgcctgcgatatctacatttgggcccctctggctggtacttgcggggtcctgctgctttcactcgtgatcactctttactgtaagcgcggtcggaagaagctgctgtacatctttaagcaacccttcatgaggcctgtgcagactactcaagaggaggacggctgttcatgccggttcccagaggaggaggaaggcggctgcgaactgcgcgtgaaattcagccgcagcgcagatgctccagcctacaagcaggggcagaaccagctctacaacgaactcaatcttggtcggagagaggagtacgacgtgctggacaagcggagaggacgggacccagaaatgggcgggaagccgcgcagaaagaatccccaagagggcctgtacaacgagctccaaaaggataagatggcagaagcctatagcgagattggtatgaaaggggaacgcagaagaggcaaaggccacgacggactgtaccagggactcagcaccgccaccaaggacacctatgacgctcttcacatgcaggccctgccgcctcgg

SEQ ID NO: 86 - DNA, 1458 bp, synthetic construct
  misc_feature 1..1458: note = source = /note="Description of Artificial Sequence: Synthetic polynucleotide"
  source 1..1458: mol_type = other DNA
atggccctccctgtcaccgccctgctgcttccgctggctcttctgctccacgccgctcggcccgaaattgtgatgacccagtcacccgccactcttagcctttcacccggtgagcgcgcaaccctgtcttgcagagcctcccaagacatctcaaaataccttaattggtatcaacagaagcccggacaggctcctcgccttctgatctaccacaccagccggctccattctggaatccctgccaggttcagcggtagcggatctgggaccgactacaccctcactatcagctcactgcagccagaggacttcgctgtctatttctgtcagcaagggaacaccctgccctacacctttggacagggcaccaagctcgagattaaaggtggaggtggcagcggaggaggtgggtccggcggtggaggaagccaggtccaactccaagaaagcggaccgggtcttgtgaagccatcagaaactctttcactgacttgtactgtgagcggagtgtctctccccgattacggggtgtcttggatcagacagccaccggggaagggtctggaatggattggagtgatttggggctctgagactacttactaccaatcatccctcaagtcacgcgtcaccatctcaaaggacaactctaagaatcaggtgtcactgaaactgtcatctgtgaccgcagccgacaccgccgtgtactattgcgctaagcattactattatggcgggagctacgcaatggattactggggacagggtactctggtcaccgtgtccagcaccactaccccagcaccgaggccacccaccccggctcctaccatcgcctcccagcctctgtccctgcgtccggaggcatgtagacccgcagctggtggggccgtgcatacccggggtcttgacttcgcctgcgatatctacatttgggcccctctggctggtacttgcggggtcctgctgctttcactcgtgatcactctttactgtaagcgcggtcggaagaagctgctgtacatctttaagcaacccttcatgaggcctgtgcagactactcaagaggaggacggctgttcatgccggttcccagaggaggaggaaggcggctgcgaactgcgcgtgaaattcagccgcagcgcagatgctccagcctacaagcaggggcagaaccagctctacaacgaactcaatcttggtcggagagaggagtacgacgtgctggacaagcggagaggacgggacccagaaatgggcgggaagccgcgcagaaagaatccccaagagggcctgtacaacgagctccaaaaggataagatggcagaagcctatagcgagattggtatgaaaggggaacgcagaagaggcaaaggccacgacggactgtaccagggactcagcaccgccaccaaggacacctatgacgctcttcacatgcaggccctgccgcctcgg

SEQ ID NO: 87 - DNA, 1458 bp, synthetic construct
  misc_feature 1..1458: note = source = /note="Description of Artificial Sequence: Synthetic polynucleotide"
  source 1..1458: mol_type = other DNA
atggctctgcccgtgaccgcactcctcctgccactggctctgctgcttcacgccgctcgcccacaagtccagcttcaagaatcagggcctggtctggtgaagccatctgagactctgtccctcacttgcaccgtgagcggagtgtccctcccagactacggagtgagctggattagacagcctcccggaaagggactggagtggatcggagtgatttggggtagcgaaaccacttactattcatcttccctgaagtcacgggtcaccatttcaaaggataactcaaagaatcaagtgagcctcaagctctcatcagtcaccgccgctgacaccgccgtgtattactgtgccaagcattactactatggagggtcctacgccatggactactggggccagggaactctggtcactgtgtcatctggtggaggaggtagcggaggaggcgggagcggtggaggtggctccgaaatcgtgatgacccagagccctgcaaccctgtccctttctcccggggaacgggctaccctttcttgtcgggcatcacaagatatctcaaaatacctcaattggtatcaacagaagccgggacaggcccctaggcttcttatctaccacacctctcgcctgcatagcgggattcccgcacgctttagcgggtctggaagcgggaccgactacactctgaccatctcatctctccagcccgaggacttcgccgtctacttctgccagcagggtaacaccctgccgtacaccttcggccagggcaccaagcttgagatcaaaaccactactcccgctccaaggccacccacccctgccccgaccatcgcctctcagccgctttccctgcgtccggaggcatgtagacccgcagctggtggggccgtgcatacccggggtcttgacttcgcctgcgatatctacatttgggcccctctggctggtacttgcggggtcctgctgctttcactcgtgatcactctttactgtaagcgcggtcggaagaagctgctgtacatctttaagcaacccttcatgaggcctgtgcagactactcaagaggaggacggctgttcatgccggttcccagaggaggaggaaggcggctgcgaactgcgcgtgaaattcagccgcagcgcagatgctccagcctacaagcaggggcagaaccagctctacaacgaactcaatcttggtcggagagaggagtacgacgtgctggacaagcggagaggacgggacccagaaatgggcgggaagccgcgcagaaagaatccccaagagggcctgtacaacgagctccaaaaggataagatggcagaagcctatagcgagattggtatgaaaggggaacgcagaagaggcaaaggccacgacggactgtaccagggactcagcaccgccaccaaggacacctatgacgctcttcacatgcaggccctgccgcctcgg

SEQ ID NO: 88 - DNA, 1458 bp, synthetic construct
  misc_feature 1..1458: note = source = /note="Description of Artificial Sequence: Synthetic polynucleotide"
  source 1..1458: mol_type = other DNA
atggctctgcccgtgaccgcactcctcctgccactggctctgctgcttcacgccgctcgcccacaagtccagcttcaagaatcagggcctggtctggtgaagccatctgagactctgtccctcacttgcaccgtgagcggagtgtccctcccagactacggagtgagctggattagacagcctcccggaaagggactggagtggatcggagtgatttggggtagcgaaaccacttactatcaatcttccctgaagtcacgggtcaccatttcaaaggataactcaaagaatcaagtgagcctcaagctctcatcagtcaccgccgctgacaccgccgtgtattactgtgccaagcattactactatggagggtcctacgccatggactactggggccagggaactctggtcactgtgtcatctggtggaggaggtagcggaggaggcgggagcggtggaggtggctccgaaatcgtgatgacccagagccctgcaaccctgtccctttctcccggggaacgggctaccctttcttgtcgggcatcacaagatatctcaaaatacctcaattggtatcaacagaagccgggacaggcccctaggcttcttatctaccacacctctcgcctgcatagcgggattcccgcacgctttagcgggtctggaagcgggaccgactacactctgaccatctcatctctccagcccgaggacttcgccgtctacttctgccagcagggtaacaccctgccgtacaccttcggccagggcaccaagcttgagatcaaaaccactactcccgctccaaggccacccacccctgccccgaccatcgcctctcagccgctttccctgcgtccggaggcatgtagacccgcagctggtggggccgtgcatacccggggtcttgacttcgcctgcgatatctacatttgggcccctctggctggtacttgcggggtcctgctgctttcactcgtgatcactctttactgtaagcgcggtcggaagaagctgctgtacatctttaagcaacccttcatgaggcctgtgcagactactcaagaggaggacggctgttcatgccggttcccagaggaggaggaaggcggctgcgaactgcgcgtgaaattcagccgcagcgcagatgctccagcctacaagcaggggcagaaccagctctacaacgaactcaatcttggtcggagagaggagtacgacgtgctggacaagcggagaggacgggacccagaaatgggcgggaagccgcgcagaaagaatccccaagagggcctgtacaacgagctccaaaaggataagatggcagaagcctatagcgagattggtatgaaaggggaacgcagaagaggcaaaggccacgacggactgtaccagggactcagcaccgccaccaaggacacctatgacgctcttcacatgcaggccctgccgcctcgg

SEQ ID NO: 89 - DNA, 1473 bp, synthetic construct
  misc_feature 1..1473: note = source = /note="Description of Artificial Sequence: Synthetic polynucleotide"
  source 1..1473: mol_type = other DNA
atggccctccctgtcaccgccctgctgcttccgctggctcttctgctccacgccgctcggcccgaaattgtgatgacccagtcacccgccactcttagcctttcacccggtgagcgcgcaaccctgtcttgcagagcctcccaagacatctcaaaataccttaattggtatcaacagaagcccggacaggctcctcgccttctgatctaccacaccagccggctccattctggaatccctgccaggttcagcggtagcggatctgggaccgactacaccctcactatcagctcactgcagccagaggacttcgctgtctatttctgtcagcaagggaacaccctgccctacacctttggacagggcaccaagctcgagattaaaggtggaggtggcagcggaggaggtgggtccggcggtggaggaagcggcggaggcgggagccaggtccaactccaagaaagcggaccgggtcttgtgaagccatcagaaactctttcactgacttgtactgtgagcggagtgtctctccccgattacggggtgtcttggatcagacagccaccggggaagggtctggaatggattggagtgatttggggctctgagactacttactactcttcatccctcaagtcacgcgtcaccatctcaaaggacaactctaagaatcaggtgtcactgaaactgtcatctgtgaccgcagccgacaccgccgtgtactattgcgctaagcattactattatggcgggagctacgcaatggattactggggacagggtactctggtcaccgtgtccagcaccactaccccagcaccgaggccacccaccccggctcctaccatcgcctcccagcctctgtccctgcgtccggaggcatgtagacccgcagctggtggggccgtgcatacccggggtcttgacttcgcctgcgatatctacatttgggcccctctggctggtacttgcggggtcctgctgctttcactcgtgatcactctttactgtaagcgcggtcggaagaagctgctgtacatctttaagcaacccttcatgaggcctgtgcagactactcaagaggaggacggctgttcatgccggttcccagaggaggaggaaggcggctgcgaactgcgcgtgaaattcagccgcagcgcagatgctccagcctacaagcaggggcagaaccagctctacaacgaactcaatcttggtcggagagaggagtacgacgtgctggacaagcggagaggacgggacccagaaatgggcgggaagccgcgcagaaagaatccccaagagggcctgtacaacgagctccaaaaggataagatggcagaagcctatagcgagattggtatgaaaggggaacgcagaagaggcaaaggccacgacggactgtaccagggactcagcaccgccaccaaggacacctatgacgctcttcacatgcaggccctgccgcctcgg

SEQ ID NO: 90 - DNA, 1473 bp, synthetic construct
  misc_feature 1..1473: note = source = /note="Description of Artificial Sequence: Synthetic polynucleotide"
  source 1..1473: mol_type = other DNA
atggccctccctgtcaccgccctgctgcttccgctggctcttctgctccacgccgctcggcccgaaattgtgatgacccagtcacccgccactcttagcctttcacccggtgagcgcgcaaccctgtcttgcagagcctcccaagacatctcaaaataccttaattggtatcaacagaagcccggacaggctcctcgccttctgatctaccacaccagccggctccattctggaatccctgccaggttcagcggtagcggatctgggaccgactacaccctcactatcagctcactgcagccagaggacttcgctgtctatttctgtcagcaagggaacaccctgccctacacctttggacagggcaccaagctcgagattaaaggtggaggtggcagcggaggaggtgggtccggcggtggaggaagcggaggcggagggagccaggtccaactccaagaaagcggaccgggtcttgtgaagccatcagaaactctttcactgacttgtactgtgagcggagtgtctctccccgattacggggtgtcttggatcagacagccaccggggaagggtctggaatggattggagtgatttggggctctgagactacttactaccaatcatccctcaagtcacgcgtcaccatctcaaaggacaactctaagaatcaggtgtcactgaaactgtcatctgtgaccgcagccgacaccgccgtgtactattgcgctaagcattactattatggcgggagctacgcaatggattactggggacagggtactctggtcaccgtgtccagcaccactaccccagcaccgaggccacccaccccggctcctaccatcgcctcccagcctctgtccctgcgtccggaggcatgtagacccgcagctggtggggccgtgcatacccggggtcttgacttcgcctgcgatatctacatttgggcccctctggctggtacttgcggggtcctgctgctttcactcgtgatcactctttactgtaagcgcggtcggaagaagctgctgtacatctttaagcaacccttcatgaggcctgtgcagactactcaagaggaggacggctgttcatgccggttcccagaggaggaggaaggcggctgcgaactgcgcgtgaaattcagccgcagcgcagatgctccagcctacaagcaggggcagaaccagctctacaacgaactcaatcttggtcggagagaggagtacgacgtgctggacaagcggagaggacgggacccagaaatgggcgggaagccgcgcagaaagaatccccaagagggcctgtacaacgagctccaaaaggataagatggcagaagcctatagcgagattggtatgaaaggggaacgcagaagaggcaaaggccacgacggactgtaccagggactcagcaccgccaccaaggacacctatgacgctcttcacatgcaggccctgccgcctcgg

SEQ ID NO: 91 - DNA, 1473 bp, synthetic construct
  misc_feature 1..1473: note = source = /note="Description of Artificial Sequence: Synthetic polynucleotide"
  source 1..1473: mol_type = other DNA
atggctctgcccgtgaccgcactcctcctgccactggctctgctgcttcacgccgctcgcccacaagtccagcttcaagaatcagggcctggtctggtgaagccatctgagactctgtccctcacttgcaccgtgagcggagtgtccctcccagactacggagtgagctggattagacagcctcccggaaagggactggagtggatcggagtgatttggggtagcgaaaccacttactattcatcttccctgaagtcacgggtcaccatttcaaaggataactcaaagaatcaagtgagcctcaagctctcatcagtcaccgccgctgacaccgccgtgtattactgtgccaagcattactactatggagggtcctacgccatggactactggggccagggaactctggtcactgtgtcatctggtggaggaggtagcggaggaggcgggagcggtggaggtggctccggaggtggcggaagcgaaatcgtgatgacccagagccctgcaaccctgtccctttctcccggggaacgggctaccctttcttgtcgggcatcacaagatatctcaaaatacctcaattggtatcaacagaagccgggacaggcccctaggcttcttatctaccacacctctcgcctgcatagcgggattcccgcacgctttagcgggtctggaagcgggaccgactacactctgaccatctcatctctccagcccgaggacttcgccgtctacttctgccagcagggtaacaccctgccgtacaccttcggccagggcaccaagcttgagatcaaaaccactactcccgctccaaggccacccacccctgccccgaccatcgcctctcagccgctttccctgcgtccggaggcatgtagacccgcagctggtggggccgtgcatacccggggtcttgacttcgcctgcgatatctacatttgggcccctctggctggtacttgcggggtcctgctgctttcactcgtgatcactctttactgtaagcgcggtcggaagaagctgctgtacatctttaagcaacccttcatgaggcctgtgcagactactcaagaggaggacggctgttcatgccggttcccagaggaggaggaaggcggctgcgaactgcgcgtgaaattcagccgcagcgcagatgctccagcctacaagcaggggcagaaccagctctacaacgaactcaatcttggtcggagagaggagtacgacgtgctggacaagcggagaggacgggacccagaaatgggcgggaagccgcgcagaaagaatccccaagagggcctgtacaacgagctccaaaaggataagatggcagaagcctatagcgagattggtatgaaaggggaacgcagaagaggcaaaggccacgacggactgtaccagggactcagcaccgccaccaaggacacctatgacgctcttcacatgcaggccctgccgcctcgg

SEQ ID NO: 92 - DNA, 1473 bp, synthetic construct
  misc_feature 1..1473: note = source = /note="Description of Artificial Sequence: Synthetic polynucleotide"
  source 1..1473: mol_type = other DNA
atggctctgcccgtgaccgcactcctcctgccactggctctgctgcttcacgccgctcgcccacaagtccagcttcaagaatcagggcctggtctggtgaagccatctgagactctgtccctcacttgcaccgtgagcggagtgtccctcccagactacggagtgagctggattagacagcctcccggaaagggactggagtggatcggagtgatttggggtagcgaaaccacttactatcaatcttccctgaagtcacgggtcaccatttcaaaggataactcaaagaatcaagtgagcctcaagctctcatcagtcaccgccgctgacaccgccgtgtattactgtgccaagcattactactatggagggtcctacgccatggactactggggccagggaactctggtcactgtgtcatctggtggaggaggtagcggaggaggcgggagcggtggaggtggctccggaggcggtgggtcagaaatcgtgatgacccagagccctgcaaccctgtccctttctcccggggaacgggctaccctttcttgtcgggcatcacaagatatctcaaaatacctcaattggtatcaacagaagccgggacaggcccctaggcttcttatctaccacacctctcgcctgcatagcgggattcccgcacgctttagcgggtctggaagcgggaccgactacactctgaccatctcatctctccagcccgaggacttcgccgtctacttctgccagcagggtaacaccctgccgtacaccttcggccagggcaccaagcttgagatcaaaaccactactcccgctccaaggccacccacccctgccccgaccatcgcctctcagccgctttccctgcgtccggaggcatgtagacccgcagctggtggggccgtgcatacccggggtcttgacttcgcctgcgatatctacatttgggcccctctggctggtacttgcggggtcctgctgctttcactcgtgatcactctttactgtaagcgcggtcggaagaagctgctgtacatctttaagcaacccttcatgaggcctgtgcagactactcaagaggaggacggctgttcatgccggttcccagaggaggaggaaggcggctgcgaactgcgcgtgaaattcagccgcagcgcagatgctccagcctacaagcaggggcagaaccagctctacaacgaactcaatcttggtcggagagaggagtacgacgtgctggacaagcggagaggacgggacccagaaatgggcgggaagccgcgcagaaagaatccccaagagggcctgtacaacgagctccaaaaggataagatggcagaagcctatagcgagattggtatgaaaggggaacgcagaagaggcaaaggccacgacggactgtaccagggactcagcaccgccaccaaggacacctatgacgctcttcacatgcaggccctgccgcctcgg

SEQ ID NO: 93 - DNA, 1473 bp, synthetic construct
  misc_feature 1..1473: note = source = /note="Description of Artificial Sequence: Synthetic polynucleotide"
  source 1..1473: mol_type = other DNA
atggccctccctgtcaccgccctgctgcttccgctggctcttctgctccacgccgctcggcccgaaattgtgatgacccagtcacccgccactcttagcctttcacccggtgagcgcgcaaccctgtcttgcagagcctcccaagacatctcaaaataccttaattggtatcaacagaagcccggacaggctcctcgccttctgatctaccacaccagccggctccattctggaatccctgccaggttcagcggtagcggatctgggaccgactacaccctcactatcagctcactgcagccagaggacttcgctgtctatttctgtcagcaagggaacaccctgccctacacctttggacagggcaccaagctcgagattaaaggtggaggtggcagcggaggaggtgggtccggcggtggaggaagcggaggcggtgggagccaggtccaactccaagaaagcggaccgggtcttgtgaagccatcagaaactctttcactgacttgtactgtgagcggagtgtctctccccgattacggggtgtcttggatcagacagccaccggggaagggtctggaatggattggagtgatttggggctctgagactacttactacaactcatccctcaagtcacgcgtcaccatctcaaaggacaactctaagaatcaggtgtcactgaaactgtcatctgtgaccgcagccgacaccgccgtgtactattgcgctaagcattactattatggcgggagctacgcaatggattactggggacagggtactctggtcaccgtgtccagcaccactaccccagcaccgaggccacccaccccggctcctaccatcgcctcccagcctctgtccctgcgtccggaggcatgtagacccgcagctggtggggccgtgcatacccggggtcttgacttcgcctgcgatatctacatttgggcccctctggctggtacttgcggggtcctgctgctttcactcgtgatcactctttactgtaagcgcggtcggaagaagctgctgtacatctttaagcaacccttcatgaggcctgtgcagactactcaagaggaggacggctgttcatgccggttcccagaggaggaggaaggcggctgcgaactgcgcgtgaaattcagccgcagcgcagatgctccagcctacaagcaggggcagaaccagctctacaacgaactcaatcttggtcggagagaggagtacgacgtgctggacaagcggagaggacgggacccagaaatgggcgggaagccgcgcagaaagaatccccaagagggcctgtacaacgagctccaaaaggataagatggcagaagcctatagcgagattggtatgaaaggggaacgcagaagaggcaaaggccacgacggactgtaccagggactcagcaccgccaccaaggacacctatgacgctcttcacatgcaggccctgccgcctcgg

SEQ ID NO: 94 - DNA, 1473 bp, synthetic construct; identical to SEQ ID NO: 93
  misc_feature 1..1473: note = source = /note="Description of Artificial Sequence: Synthetic polynucleotide"
  source 1..1473: mol_type = other DNA

SEQ ID NO: 95 - DNA, 1473 bp, synthetic construct
  misc_feature 1..1473: note = source = /note="Description of Artificial Sequence: Synthetic polynucleotide"
  source 1..1473: mol_type = other DNA
atggctctgcccgtgaccgcactcctcctgccactggctctgctgcttcacgccgctcgcccacaagtccagcttcaagaatcagggcctggtctggtgaagccatctgagactctgtccctcacttgcaccgtgagcggagtgtccctcccagactacggagtgagctggattagacagcctcccggaaagggactggagtggatcggagtgatttggggtagcgaaaccacttactataactcttccctgaagtcacgggtcaccatttcaaaggataactcaaagaatcaagtgagcctcaagctctcatcagtcaccgccgctgacaccgccgtgtattactgtgccaagcattactactatggagggtcctacgccatggactactggggccagggaactctggtcactgtgtcatctggtggaggaggtagcggaggaggcgggagcggtggaggtggctccggaggtggcggaagcgaaatcgtgatgacccagagccctgcaaccctgtccctttctcccggggaacgggctaccctttcttgtcgggcatcacaagatatctcaaaatacctcaattggtatcaacagaagccgggacaggcccctaggcttcttatctaccacacctctcgcctgcatagcgggattcccgcacgctttagcgggtctggaagcgggaccgactacactctgaccatctcatctctccagcccgaggacttcgccgtctacttctgccagcagggtaacaccctgccgtacaccttcggccagggcaccaagcttgagatcaaaaccactactcccgctccaaggccacccacccctgccccgaccatcgcctctcagccgctttccctgcgtccggaggcatgtagacccgcagctggtggggccgtgcatacccggggtcttgacttcgcctgcgatatctacatttgggcccctctggctggtacttgcggggtcctgctgctttcactcgtgatcactctttactgtaagcgcggtcggaagaagctgctgtacatctttaagcaacccttcatgaggcctgtgcagactactcaagaggaggacggctgttcatgccggttcccagaggaggaggaaggcggctgcgaactgcgcgtgaaattcagccgcagcgcagatgctccagcctacaagcaggggcagaaccagctctacaacgaactcaatcttggtcggagagaggagtacgacgtgctggacaagcggagaggacgggacccagaaatgggcgggaagccgcgcagaaagaatccccaagagggcctgtacaacgagctccaaaaggataagatggcagaagcctatagcgagattggtatgaaaggggaacgcagaagaggcaaaggccacgacggactgtaccagggactcagcaccgccaccaaggacacctatgacgctcttcacatgcaggccctgccgcctcgg

SEQ ID NO: 96 - DNA, 1458 bp, synthetic construct
  misc_feature 1..1458: note = source = /note="Description of Artificial Sequence: Synthetic polynucleotide"
  source 1..1458: mol_type = other DNA
atggccctccctgtcaccgccctgctgcttccgctggctcttctgctccacgccgctcggcccgaaattgtgatgacccagtcacccgccactcttagcctttcacccggtgagcgcgcaaccctgtcttgcagagcctcccaagacatctcaaaataccttaattggtatcaacagaagcccggacaggctcctcgccttctgatctaccacaccagccggctccattctggaatccctgccaggttcagcggtagcggatctgggaccgactacaccctcactatcagctcactgcagccagaggacttcgctgtctatttctgtcagcaagggaacaccctgccctacacctttggacagggcaccaagctcgagattaaaggtggaggtggcagcggaggaggtgggtccggcggtggaggaagccaggtccaactccaagaaagcggaccgggtcttgtgaagccatcagaaactctttcactgacttgtactgtgagcggagtgtctctccccgattacggggtgtcttggatcagacagccaccggggaagggtctggaatggattggagtgatttggggctctgagactacttactacaactcatccctcaagtcacgcgtcaccatctcaaaggacaactctaagaatcaggtgtcactgaaactgtcatctgtgaccgcagccgacaccgccgtgtactattgcgctaagcattactattatggcgggagctacgcaatggattactggggacagggtactctggtcaccgtgtccagcaccactaccccagcaccgaggccacccaccccggctcctaccatcgcctcccagcctctgtccctgcgtccggaggcatgtagacccgcagctggtggggccgtgcatacccggggtcttgacttcgcctgcgatatctacatttgggcccctctggctggtacttgcggggtcctgctgctttcactcgtgatcactctttactgtaagcgcggtcggaagaagctgctgtacatctttaagcaacccttcatgaggcctgtgcagactactcaagaggaggacggctgttcatgccggttcccagaggaggaggaaggcggctgcgaactgcgcgtgaaattcagccgcagcgcagatgctccagcctacaagcaggggcagaaccagctctacaacgaactcaatcttggtcggagagaggagtacgacgtgctggacaagcggagaggacgggacccagaaatgggcgggaagccgcgcagaaagaatccccaagagggcctgtacaacgagctccaaaaggataagatggcagaagcctatagcgagattggtatgaaaggggaacgcagaagaggcaaaggccacgacggactgtaccagggactcagcaccgccaccaaggacacctatgacgctcttcacatgcaggccctgccgcctcgg

SEQ ID NO: 97 - DNA, 813 bp, synthetic construct
  misc_feature 1..813: note = source = /note="Description of Artificial Sequence: Synthetic polynucleotide"
  source 1..813: mol_type = other DNA
atggccctgcccgtcaccgctctgctgctgccccttgctctgcttcttcatgcagcaaggccggacatccagatgacccaaaccacctcatccctctctgcctctcttggagacagggtgaccatttcttgtcgcgccagccaggacatcagcaagtatctgaactggtatcagcagaagccggacggaaccgtgaagctcctgatctaccatacctctcgcctgcatagcggcgtgccctcacgcttctctggaagcggatcaggaaccgattattctctcactatttcaaatcttgagcaggaagatattgccacctatttctgccagcagggtaataccctgccctacaccttcggaggagggaccaagctcgaaatcaccggtggaggaggcagcggcggtggagggtctggtggaggtggttctgaggtgaagctgcaagaatcaggccctggacttgtggccccttcacagtccctgagcgtgacttgcaccgtgtccggagtctccctgcccgactacggagtgtcatggatcagacaacctccacggaaaggactggaatggctcggtgtcatctggggtagcgaaactacttactacaattcagccctcaaaagcaggctgactattatcaaggacaacagcaagtcccaagtctttcttaagatgaactcactccagactgacgacaccgcaatctactattgtgctaagcactactactacggaggatcctacgctatggattactggggacaaggtacttccgtcactgtctcttcacaccatcatcaccatcaccatcac

SEQ ID NO: 98 - protein, 271 aa, synthetic construct
  REGION 1..271: note = source = /note="Description of Artificial Sequence: Synthetic polypeptide"
MALPVTALLLPLALLLHAARPDIQMTQTTSSLSASLGDRVTISCRASQDISKYLNWYQQKPDGTVKLLIYHTSRLHSGVPSRFSGSGSGTDYSLTISNLEQEDIATYFCQQGNTLPYTFGGGTKLEITGGGGSGGGGSGGGGSEVKLQESGPGLVAPSQSLSVTCTVSGVSLPDYGVSWIRQPPRKGLEWLGVIWGSETTYYNSALKSRLTIIKDNSKSQVFLKMNSLQTDDTAIYYCAKHYYYGGSYAMDYWGQGTSVTVSSHHHHHHHH

SEQ ID NO: 99 - DNA, 1458 bp, synthetic construct
  misc_feature 1..1458: note = source = /note="Description of Artificial Sequence: Synthetic polynucleotide"
  source 1..1458: mol_type = other DNA
atggccttaccagtgaccgccttgctcctgccgctggccttgctgctccacgccgccaggccggacatccagatgacacagactacatcctccctgtctgcctctctgggagacagagtcaccatcagttgcagggcaagtcaggacattagtaaatatttaaattggtatcagcagaaaccagatggaactgttaaactcctgatctaccatacatcaagattacactcaggagtcccatcaaggttcagtggcagtgggtctggaacagattattctctcaccattagcaacctggagcaagaagatattgccacttacttttgccaacagggtaatacgcttccgtacacgttcggaggggggaccaagctggagatcacaggtggcggtggctcgggcggtggtgggtcgggtggcggcggatctgaggtgaaactgcaggagtcaggacctggcctggtggcgccctcacagagcctgtccgtcacatgcactgtctcaggggtctcattacccgactatggtgtaagctggattcgccagcctccacgaaagggtctggagtggctgggagtaatatggggtagtgaaaccacatactataattcagctctcaaatccagactgaccatcatcaaggacaactccaagagccaagttttcttaaaaatgaacagtctgcaaactgatgacacagccatttactactgtgccaaacattattactacggtggtagctatgctatggactactggggccaaggaacctcagtcaccgtctcctcaaccacgacgccagcgccgcgaccaccaacaccggcgcccaccatcgcgtcgcagcccctgtccctgcgcccagaggcgtgccggccagcggcggggggcgcagtgcacacgagggggctggacttcgcctgtgatatctacatctgggcgcccttggccgggacttgtggggtccttctcctgtcactggttatcaccctttactgcaaacggggcagaaagaaactcctgtatatattcaaacaaccatttatgagaccagtacaaactactcaagaggaagatggctgtagctgccgatttccagaagaagaagaaggaggatgtgaactgagagtgaagttcagcaggagcgcagacgcccccgcgtacaagcagggccagaaccagctctataacgagctcaatctaggacgaagagaggagtacgatgttttggacaagagacgtggccgggaccctgagatggggggaaagccgagaaggaagaaccctcaggaaggcctgtacaatgaactgcagaaagataagatggcggaggcctacagtgagattgggatgaaaggcgagcgccggaggggcaaggggcacgatggcctttaccagggtctcagtacagccaccaaggacacctacgacgcccttcacatgcaggccctgccccctcgc

SEQ ID NO: 100 - DNA, 1184 bp, synthetic construct
  misc_feature 1..1184: note = source = /note="Description of Artificial Sequence: Synthetic polynucleotide"
  source 1..1184: mol_type = other DNA
cgtgaggctccggtgcccgtcagtgggcagagcgcacatcgcccacagtccccgagaagttggggggaggggtcggcaattgaaccggtgcctagagaaggtggcgcggggtaaactgggaaagtgatgtcgtgtactggctccgcctttttcccgagggtgggggagaaccgtatataagtgcagtagtcgccgtgaacgttctttttcgcaacgggtttgccgccagaacacaggtaagtgccgtgtgtggttcccgcgggcctggcctctttacgggttatggcccttgcgtgccttgaattacttccacctggctgcagtacgtgattcttgatcccgagcttcgggttggaagtgggtgggagagttcgaggccttgcgcttaaggagccccttcgcctcgtgcttgagttgaggcctggcctgggcgctggggccgccgcgtgcgaatctggtggcaccttcgcgcctgtctcgctgctttcgataagtctctagccatttaaaatttttgatgacctgctgcgacgctttttttctggcaagatagtcttgtaaatgcgggccaagatctgcacactggtatttcggtttttggggccgcgggcggcgacggggcccgtgcgtcccagcgcacatgttcggcgaggcggggcctgcgagcgcggccaccgagaatcggacgggggtagtctcaagctggccggcctgctctggtgcctggcctcgcgccgccgtgtatcgccccgccctgggcggcaaggctggcccggtcggcaccagttgcgtgagcggaaagatggccgcttcccggccctgctgcagggagctcaaaatggaggacgcggcgctcgggagagcgggcgggtgagtcacccacacaaaggaaaagggcctttccgtcctcagccgtcgcttcatgtgactccacggagtaccgggcgccgtccaggcacctcgattagttctcgagcttttggagtacgtcgtctttaggttggggggaggggttttatgcgatggagtttccccacactgagtgggtggagactgaagttaggccagcttggcacttgatgtaattctccttggaatttgccctttttgagtttggatcttggttcattctcaagcctcagacagtggttcaaagtttttttcttccatttcaggtgtcgtga

SEQ ID NO: 101 - DNA, 336 bp, synthetic construct
  misc_feature 1..336: note = source = /note="Description of Artificial Sequence: Synthetic polynucleotide"
  source 1..336: mol_type = other DNA
agagtgaagttcagcaggagcgcagacgcccccgcgtacaagcagggccagaaccagctctataacgagctcaatctaggacgaagagaggagtacgatgttttggacaagagacgtggccgggaccctgagatggggggaaagccgagaaggaagaaccctcaggaaggcctgtacaatgaactgcagaaagataagatggcggaggcctacagtgagattgggatgaaaggcgagcgccggaggggcaaggggcacgatggcctttaccagggtctcagtacagccaccaaggacacctacgacgcccttcacatgcaggccctgccccctcgc

SEQ ID NO: 102 - protein, 230 aa, synthetic construct; identical to SEQ ID NO: 45
  REGION 1..230: note = source = /note="Description of Artificial Sequence: Synthetic polypeptide"

SEQ ID NO: 103 - DNA, 690 bp, synthetic construct; identical to SEQ ID NO: 46
  misc_feature 1..690: note = source = /note="Description of Artificial Sequence: Synthetic polynucleotide"
  source 1..690: mol_type = other DNA

SEQ ID NO: 104 - skipped

SEQ ID NO: 105 - protein, 40 aa, synthetic construct
  REGION 1..40: note = MISC_FEATURE - /note="This sequence may encompass 1-10 'Gly-Gly-Gly-Ser' repeating units"
  REGION 1..40: note = source = /note="Description of Artificial Sequence: Synthetic polypeptide"
GGGSGGGSGGGSGGGSGGGSGGGSGGGSGGGSGGGSGGGS

SEQ ID NO: 106 - protein, 20 aa, synthetic construct
  REGION 1..20: note = source = /note="Description of Artificial Sequence: Synthetic peptide"
GGGGSGGGGSGGGGSGGGGS

SEQ ID NO: 107 - protein, 15 aa, synthetic construct
  REGION 1..15: note = source = /note="Description of Artificial Sequence: Synthetic peptide"
GGGGSGGGGSGGGGS

SEQ ID NO: 108 - protein, 4 aa, synthetic construct
  REGION 1..4: note = source = /note="Description of Artificial Sequence: Synthetic peptide"
GGGS

SEQ ID NO: 109 - protein, 244 aa, synthetic construct
  REGION 1..244: note = source = /note="Description of Artificial Sequence: Synthetic polypeptide"
QVQLLESGAELVRPGSSVKISCKASGYAFSSYWMNWVKQRPGQGLEWIGQIYPGDGDTNYNGKFKGQATLTADKSSSTAYMQLSGLTSEDSAVYSCARKTISSVVDFYFDYWGQGTTVTGGGSGGGSGGGSGGGSELVLTQSPKFMSTSVGDRVSVTCKASQNVGTNVAWYQQKPGQSPKPLIYSATYRNSGVPDRFTGSGSGTDFTLTITNVQSKDLADYFCQYNRYPYTSFFFTKLEIKRRS

SEQ ID NO: 110 - protein, 464 aa, synthetic construct
  REGION 1..464: note = source = /note="Description of Artificial Sequence: Synthetic polypeptide"
QVQLLESGAELVRPGSSVKISCKASGYAFSSYWMNWVKQRPGQGLEWIGQIYPGDGDTNYNGKFKGQATLTADKSSSTAYMQLSGLTSEDSAVYSCARKTISSVVDFYFDYWGQGTTVTGGGSGGGSGGGSGGGSELVLTQSPKFMSTSVGDRVSVTCKASQNVGTNVAWYQQKPGQSPKPLIYSATYRNSGVPDRFTGSGSGTDFTLTITNVQSKDLADYFCQYNRYPYTSFFFTKLEIKRRSKIEVMYPPPYLDNEKSNGTIIHVKGKHLCPSPLFPGPSKPFWVLVVVGGVLACYSLLVTVAFIIFWVRSKRSRLLHSDYMNMTPRRPGPTRKHYQPYAPPRDFAAYRSRVKFSRSADAPAYQQGQNQLYNELNLGRREEYDVLDKRRGRDPEMGGKPRRKNPQEGLYNELQKDKMAEAYSEIGMKGERRRGKGHDGLYQGLSTATKDTYDALHMQALPPR

SEQ ID NO: 111 - protein, 246 aa, synthetic construct
  REGION 1..246: note = source = /note="Description of Artificial Sequence: Synthetic polypeptide"
DIQMTQTTSSLSASLGDRVTISCRASQDISKYLNWYQQKPDGTVKLLIYHTSRLHSGVPSRFSGSGSGTDYSLTISNLEQEDIATYFCQQGNTLPYTFGGGTKLEITGSTSGSGKPGSGEGSTKGEVKLQESGPGLVAPSQSLSVTCTVSGVSLPDYGVSWIRQPPRKGLEWLGVIWGSETTYYNSALKSRLTIIKDNSKSQVFLKMNSLQTDDTAIYYCAKHYYYGGSYAMDYWGQGTSVTVSSE

SEQ ID NO: 112 - protein, 439 aa, synthetic construct
  REGION 1..439: note = source = /note="Description of Artificial Sequence: Synthetic polypeptide"
DIQMTQTTSSLSASLGDRVTISCRASQDISKYLNWYQQKPDGTVKLLIYHTSRLHSGVPSRFSGSGSGTDYSLTISNLEQEDIATYFCQQGNTLPYTFGGGTKLEITGSTSGSGKPGSGEGSTKGEVKLQESGPGLVAPSQSLSVTCTVSGVSLPDYGVSWIRQPPRKGLEWLGVIWGSETTYYNSALKSRLTIIKDNSKSQVFLKMNSLQTDDTAIYYCAKHYYYGGSYAMDYWGQGTSVTVSSESKYGPPCPPCPMFWVLVVVGGVLACYSLLVTVAFIIFWVKRGRKKLLYIFKQPFMRPVQTTQEEDGCSCRFEEEEGGCELRVKFSRSADAPAYQQGQNQLYNELNLGRREEYDVLDKRRGRDPEMGGKPRRKNPQEGLYNELQKDKMAEAYSEIGMKGERRRGKGHDGLYQGLSTATKDTYDALHMQALPPRL

SEQ ID NO: 113 - protein, 819 aa, synthetic construct
  REGION 1..819: note = source = /note="Description of Artificial Sequence: Synthetic polypeptide"
DIQMTQTTSSLSASLGDRVTISCRASQDISKYLNWYQQKPDGTVKLLIYHTSRLHSGVPSRFSGSGSGTDYSLTISNLEQEDIATYFCQQGNTLPYTFGGGTKLEITGSTSGSGKPGSGEGSTKGEVKLQESGPGLVAPSQSLSVTCTVSGVSLPDYGVSWIRQPPRKGLEWLGVIWGSETTYYNSALKSRLTIIKDNSKSQVFLKMNSLQTDDTAIYYCAKHYYYGGSYAMDYWGQGTSVTVSSESKYGPPCPPCPMFWVLVVVGGVLACYSLLVTVAFIIFWVKRGRKKLLYIFKQPFMRPVQTTQEEDGCSCRFEEEEGGCELRVKFSRSADAPAYQQGQNQLYNELNLGRREEYDVLDKRRGRDPEMGGKPRRKNPQEGLYNELQKDKMAEAYSEIGMKGERRRGKGHDGLYQGLSTATKDTYDALHMQALPPRLEGGGEGRGSLLTCGDVEENPGPRMLLLVTSLLLCELPHPAFLLIPRKVCNGIGIGEFKDSLSINATNIKHFKNCTSISGDLHILPVAFRGDSFTHTPPLDPQELDILKTVKEITGFLLIQAWPENRTDLHAFENLEIIRGRTKQHGQFSLAVVSLNITSLGLRSLKEISDGDVIISGNKNLCYANTINWKKLFGTSGQKTKIISNRGENSCKATGQVCHALCSPEGCWGPEPRDCVSCRNVSRGRECVDKCNLLEGEPREFVENSECIQCHPECLPQAMNITCTGRGPDNCIQCAHYIDGPHCVKTCPAGVMGENNTLVWKYADAGHVCHLCHPNCTYGCTGPGLEGCPTNGPKIPSIATGMVGALLLLLVVALGIGLFM

SEQ ID NO: 114 - protein, 245 aa, synthetic construct
  REGION 1..245: note = source = /note="Description of Artificial Sequence: Synthetic polypeptide"
DIQMTQTTSSLSASLGDRVTISCRASQDISKYLNWYQQKPDGTVKLLIYHTSRLHSGVPSRFSGSGSGTDYSLTISNLEQEDIATYFCQQGNTLPYTFGGGTKLEITGSTSGSGKPGSGEGSTKGEVKLQESGPGLVAPSQSLSVTCTVSGVSLPDYGVSWIRQPPRKGLEWLGVIWGSETTYYNSALKSRLTIIKDNSKSQVFLKMNSLQTDDTAIYYCAKHYYYGGSYAMDYWGQGTSVTVSS

SEQ ID NO: 115 - protein, 467 aa, synthetic construct
  REGION 1..467: note = source = /note="Description of Artificial Sequence: Synthetic polypeptide"
DIQMTQTTSSLSASLGDRVTISCRASQDISKYLNWYQQKPDGTVKLLIYHTSRLHSGVPSRFSGSGSGTDYSLTISNLEQEDIATYFCQQGNTLPYTFGGGTKLEITGSTSGSGKPGSGEGSTKGEVKLQESGPGLVAPSQSLSVTCTVSGVSLPDYGVSWIRQPPRKGLEWLGVIWGSETTYYNSALKSRLTIIKDNSKSQVFLKMNSLQTDDTAIYYCAKHYYYGGSYAMDYWGQGTSVTVSSAAAIEVMYPPPYLDNEKSNGTIIHVKGKHLCPSPLFPGPSKPFWVLVVVGGVLACYSLLVTVAFIIFWVRSKRSRLLHSDYMNMTPRRPGPTRKHYQPYAPPRDFAAYRSRVKFSRSADAPAYQQGQNQLYNELNLGRREEYDVLDKRRGRDPEMGGKPRRKNPQEGLYNELQKDKMAEAYSEIGMKGERRRGKGHDGLYQGLSTATKDTYDALHMQALPPR

SEQ ID NO: 116-117 - skipped (2 entries)

SEQ ID NO: 118 - DNA, 2000 bp, synthetic construct
  misc_feature 1..2000: note = /note="This sequence may encompass 50-2000 nucleotides"
  misc_feature 1..2000: note = source = /note="Description of Artificial Sequence: Synthetic polynucleotide"
  source 1..2000: mol_type = other DNA
aaaaaaaaaaaaaaaaaaaaaaaaaaaaaaaaaaaaaaaaaaaaaaaaaaaaaaaaaaaaaaaaaaaaaaaaaaaaaaaaaaaaaaaaaaaaaaaaaaaaaaaaaaaaaaaaaaaaaaaaaaaaaaaaaaaaaaaaaaaaaaaaaaaaaaaaaaaaaaaaaaaaaaaaaaaaaaaaaaaaaaaaaaaaaaaaaaaaaaaaaaaaaaaaaaaaaaaaaaaaaaaaaaaaaaaaaaaaaaaaaaaaaaaaaaaaaaaaaaaaaaaaaaaaaaaaaaaaaaaaaaaaaaaaaaaaaaaaaaaaaaaaaaaaaaaaaaaaaaaaaaaaaaaaaaaaaaaaaaaaaaaaaaaaaaaaaaaaaaaaaaaaaaaaaaaaaaaaaaaaaaaaaaaaaaaaaaaaaaaaaaaaaaaaaaaaaaaaaaaaaaaaaaaaaaaaaaaaaaaaaaaaaaaaaaaaaaaaaaaaaaaaaaaaaaaaaaaaaaaaaaaaaaaaaaaaaaaaaaaaaaaaaaaaaaaaaaaaaaaaaaaaaaaaaaaaaaaaaaaaaaaaaaaaaaaaaaaaaaaaaaaaaaaaaaaaaaaaaaaaaaaaaaaaaaaaaaaaaaaaaaaaaaaaaaaaaaaaaaaaaaaaaaaaaaaaaaaaaaaaaaaaaaaaaaaaaaaaaaaaaaaaaaaaaaaaaaaaaaaaaaaaaaaaaaaaaaaaaaaaaaaaaaaaaaaaaaaaaaaaaaaaaaaaaaaaaaaaaaaaaaaaaaaaaaaaaaaaaaaaaaaaaaaaaaaaaaaaaaaaaaaaaaaaaaaaaaaaaaaaaaaaaaaaaaaaaaaaaaaaaaaaaaaaaaaaaaaaaaaaaaaaaaaaaaaaaaaaaaaaaaaaaaaaaaaaaaaaaaaaaaaaaaaaaaaaaaaaaaaaaaaaaaaaaaaaaaaaaaaaaaaaaaaaaaaaaaaaaaaaaaaaaaaaaaaaaaaaaaaaaaaaaaaaaaaaaaaaaaaaaaaaaaaaaaaaaaaaaaaaaaaaaaaaaaaaaaaaaaaaaaaaaaaaaaaaaaaaaaaaaaaaaaaaaaaaaaaaaaaaaaaaaaaaaaaaaaaaaaaaaaaaaaaaaaaaaaaaaaaaaaaaaaaaaaaaaaaaaaaaaaaaaaaaaaaaaaaaaaaaaaaaaaaaaaaaaaaaaaaaaaaaaaaaaaaaaaaaaaaaaaaaaaaaaaaaaaaaaaaaaaaaaaaaaaaaaaaaaaaaaaaaaaaaaaaaaaaaaaaaaaaaaaaaaaaaaaaaaaaaaaaaaaaaaaaaaaaaaaaaaaaaaaaaaaaaaaaaaaaaaaaaaaaaaaaaaaaaaaaaaaaaaaaaaaaaaaaaaaaaaaaaaaaaaaaaaaaaaaaaaaaaaaaaaaaaaaaaaaaaaaaaaaaaaaaaaaaaaaaaaaaaaaaaaaaaaaaaaaaaaaaaaaaaaaaaaaaaaaaaaaaaaaaaaaaaaaaaaaaaaaaaaaaaaaaaaaaaaaaaaaaaaaaaaaaaaaaaaaaaaaaaaaaaaaaaaaaaaaaaaaaaaaaaaaaaaaaaaaaaaaaaaaaaaaaaaaaaaaaaaaaaaaaaaaaaaaaaaaaaaaaaaaaaaaaaaaaaaaaaaaaaaaaaaaaaaaaaaaaaaaaaaaaaaaaaaaaaaaaaaaaaaaaaaaaaaaaaaaaaaaaaaaaaaaaaaaaaaaaaaaaaaaaaaaaaaaaaaaaaaaaaaaaaaaaaaaaaaaaaaaaaaaaaaaaaaaaaaaaaaaaaaaaaaaaaaaaaaaaaaaaaaaaaaaaaaaaaaaaaaaaaaaaaaaaaaaaaaaaaaaaaaaaaaaaaaaaaaaaaaaaaaaaaaaaaaaaaaaaaaaaaaaaaaaaaaaaaaaaaaaaaaaaaaaaaaaaaaaaaaaaaaaaaaaaaaaaaaaaaaaaaaaaaaaaaaaaaaaaaaaaaaaaaaaaaaaaaaaaaaaaaaaaaaaaaaaaaaaaaaaaaaaaaaaaaaaaaaaaaaaaaaaaaaaaaaaaaaaaa

SEQ ID NO: 119 - protein, 373 aa, synthetic construct
  REGION 1..373: note = source = /note="Description of Artificial Sequence: Synthetic polypeptide"
PGWFLDSPDRPWNPPTFSPALLVVTEGDNATFTCSFSNTSESFVLNWYRMSPSNQTDKLAAFPEDRSQPGQDCRFRVTQLPNGRDFHMSVVRARRNDSGTYLCGAISLAPKAQIKESLRAELRVTERRAEVPTAHPSPSPRPAGQFQTLVTTTPAPRPPTPAPTIASQPLSLRPEACRPAAGGAVHTRGLDFACDIYIWAPLAGTCGVLLLSLVITLYCKRGRKKLLYIFKQPFMRPVQTTQEEDGCSCRFPEEEEGGCELRVKFSRSADAPAYKQGQNQLYNELNLGRREEYDVLDKRRGRDPEMGGKPRRKNPQEGLYNELQKDKMAEAYSEIGMKGERRRGKGHDGLYQGLSTATKDTYDALHMQALPPR

SEQ ID NO: 120 - DNA, 1182 bp, synthetic construct
  misc_feature 1..1182: note = source = /note="Description of Artificial Sequence: Synthetic polynucleotide"
  source 1..1182: mol_type = other DNA
atggccctccctgtcactgccctgcttctccccctcgcactcctgctccacgccgctagaccacccggatggtttctggactctccggatcgcccgtggaatcccccaaccttctcaccggcactcttggttgtgactgagggcgataatgcgaccttcacgtgctcgttctccaacacctccgaatcattcgtgctgaactggtaccgcatgagcccgtcaaaccagaccgacaagctcgccgcgtttccggaagatcggtcgcaaccgggacaggattgtcggttccgcgtgactcaactgccgaatggcagagacttccacatgagcgtggtccgcgctaggcgaaacgactccgggacctacctgtgcggagccatctcgctggcgcctaaggcccaaatcaaagagagcttgagggccgaactgagagtgaccgagcgcagagctgaggtgccaactgcacatccatccccatcgcctcggcctgcggggcagtttcagaccctggtcacgaccactccggcgccgcgcccaccgactccggccccaactatcgcgagccagcccctgtcgctgaggccggaagcatgccgccctgccgccggaggtgctgtgcatacccggggattggacttcgcatgcgacatctacatttgggctcctctcgccggaacttgtggcgtgctccttctgtccctggtcatcaccctgtactgcaagcggggtcggaaaaagcttctgtacattttcaagcagcccttcatgaggcccgtgcaaaccacccaggaggaggacggttgctcctgccggttccccgaagaggaagaaggaggttgcgagctgcgcgtgaagttctcccggagcgccgacgcccccgcctataagcagggccagaaccagctgtacaacgaactgaacctgggacggcgggaagagtacgatgtgctggacaagcggcgcggccgggaccccgaaatgggcgggaagcctagaagaaagaaccctcaggaaggcctgtataacgagctgcagaaggacaagatggccgaggcctactccgaaattgggatgaagggagagcggcggaggggaaaggggcacgacggcctgtaccaaggactgtccaccgccaccaaggacacatacgatgccctgcacatgcaggcccttccccctcgc

SEQ ID NO: 121 - protein, 394 aa, synthetic construct
  REGION 1..394: note = source = /note="Description of Artificial Sequence: Synthetic polypeptide"
MALPVTALLLPLALLLHAARPPGWFLDSPDRPWNPPTFSPALLVVTEGDNATFTCSFSNTSESFVLNWYRMSPSNQTDKLAAFPEDRSQPGQDCRFRVTQLPNGRDFHMSVVRARRNDSGTYLCGAISLAPKAQIKESLRAELRVTERRAEVPTAHPSPSPRPAGQFQTLVTTTPAPRPPTPAPTIASQPLSLRPEACRPAAGGAVHTRGLDFACDIYIWAPLAGTCGVLLLSLVITLYCKRGRKKLLYIFKQPFMRPVQTTQEEDGCSCRFPEEEEGGCELRVKFSRSADAPAYKQGQNQLYNELNLGRREEYDVLDKRRGRDPEMGGKPRRKNPQEGLYNELQKDKMAEAYSEIGMKGERRRGKGHDGLYQGLSTATKDTYDALHMQALPPR

SEQ ID NO: 122 - protein, 132 aa, synthetic construct
  REGION 1..132: note = source = /note="Description of Artificial Sequence: Synthetic polypeptide"
DVPDYASLGGPSSPKKKRKVSRGVQVETISPGDGRTFPKRGQTCVVHYTGMLEDGKKFDSSRDRNKPFKFMLGKQEVIRGWEEGVAQMSVGQRAKLTISPDYAYGATGHPGIIPPHATLVFDVELLKLETSY

SEQ ID NO: 123 - protein, 108 aa, synthetic construct
  REGION 1..108: note = source = /note="Description of Artificial Sequence: Synthetic polypeptide"
VQVETISPGDGRTFPKRGQTCVVHYTGMLEDGKKFDSSRDRNKPFKFMLGKQEVIRGWEEGVAQMSVGQRAKLTISPDYAYGATGHPGIIPPHATLVFDVELLKLETS

SEQ ID NO: 124 - protein, 93 aa, synthetic construct [sequence omitted]

SEQ ID NO: 125 - protein, 95 aa, synthetic construct
  REGION 1..95: note = source = /note="Description of Artificial Sequence: Synthetic polypeptide"
ILWHEMWHEGLIEASRLYFGERNVKGMFEVLEPLHAMMERGPQTLKETSFNQAYGRDLMEAQEWCRKYMKSGNVKDLTQAWDLYYHVFRRISKTS

SEQ ID NO: 126 - protein, 95 aa, synthetic construct
  REGION 1..95: note = source = /note="Description of Artificial Sequence: Synthetic polypeptide"
ILWHEMWHEGLLEASRLYFGERNVKGMFEVLEPLHAMMERGPQTLKETSFNQAYGRDLMEAQEWCRKYMKSGNVKDLTQAWDLYYHVFRRISKTS

SEQ ID NO: 127 - protein, 95 aa, synthetic construct
  REGION 1..95: note = source = /note="Description of Artificial Sequence: Synthetic polypeptide"
ILWHEMWHEGLEEASRLYFGERNVKGMFEVLEPLHAMMERGPQTLKETSFNQAYGRDLMEAQEWCRKYMKSGNVKDLLQAWDLYYHVFRRISKTS

SEQ ID NO: 128 - protein, 95 aa, synthetic construct
  MOD_RES 12: note = Any amino acid
  MOD_RES 78: note = Any amino acid
  REGION 1..95: note = source = /note="Description of Artificial Sequence: Synthetic polypeptide"
ILWHEMWHEGLXEASRLYFGERNVKGMFEVLEPLHAMMERGPQTLKETSFNQAYGRDLMEAQEWCRKYMKSGNVKDLXQAWDLYYHVFRRISKTS

SEQ ID NO: 129 - protein, 95 aa, synthetic construct
  REGION 1..95: note = source = /note="Description of Artificial Sequence: Synthetic polypeptide"
ILWHEMWHEGLIEASRLYFGERNVKGMFEVLEPLHAMMERGPQTLKETSFNQAYGRDLMEAQEWCRKYMKSGNVKDLLQAWDLYYHVFRRISKTS

SEQ ID NO: 130 - protein, 95 aa, synthetic construct
  REGION 1..95: note = source = /note="Description of Artificial Sequence: Synthetic polypeptide"
ILWHEMWHEGLLEASRLYFGERNVKGMFEVLEPLHAMMERGPQTLKETSFNQAYGRDLMEAQEWCRKYMKSGNVKDLLQAWDLYYHVFRRISKTS

SEQ ID NO: 131-1033 - skipped (903 entries)

SEQ ID NO: 1034 - protein, 7 aa, synthetic construct
  REGION 1..7: note = source = /note="Description of Artificial Sequence: Synthetic peptide"
AASSLQS

SEQ ID NO: 1035-1314 - skipped (280 entries)

SEQ ID NO: 1315 - DNA, 120 bp, synthetic construct
  misc_feature 1..120: note = source = /note="Description of Artificial Sequence: Synthetic polynucleotide"
  source 1..120: mol_type = other DNA
agcttggatccaagaggaaaatttgtttcatacagaaggcgttaagaggaaaatttgtttcatacagaaggcgttaagaggaaaatttgtttcatacagaaggcgttcaagcttgtcgac

SEQ ID NO: 1316 - protein, 4 aa, synthetic construct
  REGION 1..4: note = source = /note="Description of Artificial Sequence: Synthetic peptide"
RGDS

SEQ ID NO: 1317 - protein, 41 aa, synthetic construct
  REGION 1..41: note = source = /note="Description of Artificial Sequence: Synthetic polypeptide"
RSKRSRLLHSDYMNMTPRRPGPTRKHYQPYAPPRDFAAYRS

SEQ ID NO: 1318 - DNA, 123 bp, synthetic construct; identical to SEQ ID NO: 52
  misc_feature 1..123: note = source = /note="Description of Artificial Sequence: Synthetic polynucleotide"
  source 1..123: mol_type = other DNA

SEQ ID NO: 1319 - protein, 35 aa, synthetic construct
  REGION 1..35: note = source = /note="Description of Artificial Sequence: Synthetic polypeptide"
TKKKYSSSVHDPNGEYMFMRAVNTAKKSRLTDVTL

SEQ ID NO: 1320 - DNA, 105 bp, synthetic construct
  misc_feature 1..105: note = source = /note="Description of Artificial Sequence: Synthetic polynucleotide"
  source 1..105: mol_type = other DNA
acaaaaaagaagtattcatccagtgtgcacgaccctaacggtgaatacatgttcatgagagcagtgaacacagccaaaaaatccagactcacagatgtgacccta

SEQ ID NO: 1321 - protein, 35 aa, synthetic construct
  REGION 1..35: note = source = /note="Description of Artificial Sequence: Synthetic polypeptide"
TKKKYSSSVHDPNGEFMFMRAVNTAKKSRLTDVTL

SEQ ID NO: 1322 - skipped

SEQ ID NO: 1323 - DNA, 521 bp, synthetic construct
  misc_feature 1..521: note = source = /note="Description of Artificial Sequence: Synthetic polynucleotide"
  source 1..521: mol_type = other DNA
acccctctctccagccactaagccagttgctccctcggctgacggctgcacgcgaggcctccgaacgtcttacgccttgtggcgcgcccgtccttgtcccgggtgtgatggcggggtgtggggcggagggcgtggcggggaagggccggcgacgagagccgcgcgggacgactcgtcggcgataaccggtgtcgggtagcgccagccgcgcgacggtaacgagggaccgcgacaggcagacgctcccatgatcactctgcacgccgaaggcaaatagtgcaggccgtgcggcgcttggcgttccttggaagggctgaatccccgcctcgtccttcgcagcggccccccgggtgttcccatcgccgcttctaggcccactgcgacgcttgcctgcacttcttacacgctctgggtcccagccgcggcgacgcaaagggccttggtgcgggtctcgtcggcgcagggacgcgtttgggtcccgacggaaccttttccgcgttggggttggggcaccataagct

SEQ ID NO: 1324 - DNA, 118 bp, synthetic construct
  misc_feature 1..118: note = source = /note="Description of Artificial Sequence: Synthetic polynucleotide"
  source 1..118: mol_type = other DNA
acccctctctccagccactaagccagttgctccctcggctgacggctgcacgcgaggcctccgaacgtcttacgccttgtggcgcgcccgtccttgtcccgggtgtgatggcggggtg

SEQ ID NO: 1325 - DNA, 221 bp, synthetic construct
  misc_feature 1..221: note = source = /note="Description of Artificial Sequence: Synthetic polynucleotide"
  source 1..221: mol_type = other DNA
acccctctctccagccactaagccagttgctccctcggctgacggctgcacgcgaggcctccgaacgtcttacgccttgtggcgcgcccgtccttgtcccgggtgtgatggcggggtgtggggcggagggcgtggcggggaagggccggcgacgagagccgcgcgggacgactcgtcggcgataaccggtgtcgggtagcgccagccgcgcgacggtaacg

SEQ ID NO: 1326 - DNA, 324 bp, synthetic construct
  misc_feature 1..324: note = source = /note="Description of Artificial Sequence: Synthetic polynucleotide"
  source 1..324: mol_type = other DNA
acccctctctccagccactaagccagttgctccctcggctgacggctgcacgcgaggcctccgaacgtcttacgccttgtggcgcgcccgtccttgtcccgggtgtgatggcggggtgtggggcggagggcgtggcggggaagggccggcgacgagagccgcgcgggacgactcgtcggcgataaccggtgtcgggtagcgccagccgcgcgacggtaacgagggaccgcgacaggcagacgctcccatgatcactctgcacgccgaaggcaaatagtgcaggccgtgcggcgcttggcgttccttggaagggctgaatccccg

SEQ ID NO: 1327 - DNA, 422 bp, synthetic construct
  misc_feature 1..422: note = source = /note="Description of Artificial Sequence: Synthetic polynucleotide"
  source 1..422: mol_type = other DNA
acccctctctccagccactaagccagttgctccctcggctgacggctgcacgcgaggcctccgaacgtcttacgccttgtggcgcgcccgtccttgtcccgggtgtgatggcggggtgtggggcggagggcgtggcggggaagggccggcgacgagagccgcgcgggacgactcgtcggcgataaccggtgtcgggtagcgccagccgcgcgacggtaacgagggaccgcgacaggcagacgctcccatgatcactctgcacgccgaaggcaaatagtgcaggccgtgcggcgcttggcgttccttggaagggctgaatccccgcctcgtccttcgcagcggccccccgggtgttcccatcgccgcttctaggcccactgcgacgcttgcctgcacttcttacacgctctgggtcccagccg

SEQ ID NO: 1328 - protein, 21 aa, synthetic construct
  VARIANT 1..3: note = /replace=" "
  REGION 1..21: note = MISC_FEATURE - /note="Variant residues given in the sequence have no preference with respect to those in the annotations for variant positions"
  REGION 1..21: note = source = /note="Description of Artificial Sequence: Synthetic peptide"
GSGEGRGSLLTCGDVEENPGP

SEQ ID NO: 1329 - protein, 22 aa, synthetic construct
  VARIANT 1..3: note = /replace=" "
  REGION 1..22: note = MISC_FEATURE - /note="Variant residues given in the sequence have no preference with respect to those in the annotations for variant positions"
  REGION 1..22: note = source = /note="Description of Artificial Sequence: Synthetic peptide"
GSGATNFSLLKQAGDVEENPGP

SEQ ID NO: 1330 - protein, 23 aa, synthetic construct
  VARIANT 1..3: note = /replace=" "
  REGION 1..23: note = MISC_FEATURE - /note="Variant residues given in the sequence have no preference with respect to those in the annotations for variant positions"
  REGION 1..23: note = source = /note="Description of Artificial Sequence: Synthetic peptide"
GSGQCTNYALLKLAGDVESNPGP

SEQ ID NO: 1331 - protein, 25 aa, synthetic construct
  VARIANT 1..3: note = /replace=" "
  REGION 1..25: note = MISC_FEATURE - /note="Variant residues given in the sequence have no preference with respect to those in the annotations for variant positions"
  REGION 1..25: note = source = /note="Description of Artificial Sequence: Synthetic peptide"
GSGVKQTLNFDLLKLAGDVESNPGP

SEQ ID NO: 1332-1399 - skipped (68 entries)

SEQ ID NO: 1400 - protein, 239 aa, synthetic construct
  REGION 1..239: note = source = /note="Description of Artificial Sequence: Synthetic polypeptide"
EVQLVESGGGLVQPGGSLRLSCAVSGFALSNHGMSWVRRAPGKGLEWVSGIVYSGSTYYAASVKGRFTISRDNSRNTLYLQMNSLRPEDTAIYYCSAHGGESDVWGQGTTVTVSSASGGGGSGGRASGGGGSDIQLTQSPSSLSASVGDRVTITCRASQSISSYLNWYQQKPGKAPKLLIYAASSLQSGVPSRFSGSGSGTDFTLTISSLQPEDFATYYCQQSYSTPYTFGQGTKVEIK

SEQ ID NO: 1401 - DNA, 717 bp, synthetic construct
  misc_feature 1..717: note = source = /note="Description of Artificial Sequence: Synthetic polynucleotide"
  source 1..717: mol_type = other DNA
gaagtgcaattggtggaatcagggggaggacttgtgcagcctggaggatcgctgagactgtcatgtgccgtgtccggctttgccctgtccaaccacgggatgtcctgggtccgccgcgcgcctggaaagggcctcgaatgggtgtcgggtattgtgtacagcggtagcacctactatgccgcatccgtgaaggggagattcaccatcagccgggacaactccaggaacactctgtacctccaaatgaattcgctgaggccagaggacactgccatctactactgctccgcgcatggcggagagtccgacgtctggggacaggggaccaccgtgaccgtgtctagcgcgtccggcggaggcggcagcgggggtcgggcatcagggggcggcggatcggacatccagctcacccagtccccgagctcgctgtccgcctccgtgggagatcgggtcaccatcacgtgccgcgccagccagtcgatttcctcctacctgaactggtaccaacagaagcccggaaaagccccgaagcttctcatctacgccgcctcgagcctgcagtcaggagtgccctcacggttctccggctccggttccggtactgatttcaccctgaccatttcctccctgcaaccggaggacttcgctacttactactgccagcagtcgtactccaccccctacactttcggacaaggcaccaaggtcgaaatcaag

SEQ ID NO: 1402 - protein, 115 aa, synthetic construct
  REGION 1..115: note = source = /note="Description of Artificial Sequence: Synthetic polypeptide"
EVQLVESGGGLVQPGGSLRLSCAVSGFALSNHGMSWVRRAPGKGLEWVSGIVYSGSTYYAASVKGRFTISRDNSRNTLYLQMNSLRPEDTAIYYCSAHGGESDVWGQGTTVTVSS

SEQ ID NO: 1403 - protein, 107 aa, synthetic construct
  REGION 1..107: note = source = /note="Description of Artificial Sequence: Synthetic polypeptide"
DIQLTQSPSSLSASVGDRVTITCRASQSISSYLNWYQQKPGKAPKLLIYAASSLQSGVPSRFSGSGSGTDFTLTISSLQPEDFATYYCQQSYSTPYTFGQGTKVEIK

SEQ ID NO: 1404 - protein, 483 aa, synthetic construct
  REGION 1..483: note = source = /note="Description of Artificial Sequence: Synthetic polypeptide"
MALPVTALLLPLALLLHAARPEVQLVESGGGLVQPGGSLRLSCAVSGFALSNHGMSWVRRAPGKGLEWVSGIVYSGSTYYAASVKGRFTISRDNSRNTLYLQMNSLRPEDTAIYYCSAHGGESDVWGQGTTVTVSSASGGGGSGGRASGGGGSDIQLTQSPSSLSASVGDRVTITCRASQSISSYLNWYQQKPGKAPKLLIYAASSLQSGVPSRFSGSGSGTDFTLTISSLQPEDFATYYCQQSYSTPYTFGQGTKVEIKTTTPAPRPPTPAPTIASQPLSLRPEACRPAAGGAVHTRGLDFACDIYIWAPLAGTCGVLLLSLVITLYCKRGRKKLLYIFKQPFMRPVQTTQEEDGCSCRFPEEEEGGCELRVKFSRSADAPAYKQGQNQLYNELNLGRREEYDVLDKRRGRDPEMGGKPRRKNPQEGLYNELQKDKMAEAYSEIGMKGERRRGKGHDGLYQGLSTATKDTYDALHMQALPPR

SEQ ID NO: 1405 - DNA, 1449 bp, synthetic construct
  misc_feature 1..1449: note = source = /note="Description of Artificial Sequence: Synthetic polynucleotide"
  source 1..1449: mol_type = other DNA
atggccctccctgtcaccgccctgctgcttccgctggctcttctgctccacgccgctcggcccgaagtgcaattggtggaatcagggggaggacttgtgcagcctggaggatcgctgagactgtcatgtgccgtgtccggctttgccctgtccaaccacgggatgtcctgggtccgccgcgcgcctggaaagggcctcgaatgggtgtcgggtattgtgtacagcggtagcacctactatgccgcatccgtgaaggggagattcaccatcagccgggacaactccaggaacactctgtacctccaaatgaattcgctgaggccagaggacactgccatctactactgctccgcgcatggcggagagtccgacgtctggggacaggggaccaccgtgaccgtgtctagcgcgtccggcggaggcggcagcgggggtcgggcatcagggggcggcggatcggacatccagctcacccagtccccgagctcgctgtccgcctccgtgggagatcgggtcaccatcacgtgccgcgccagccagtcgatttcctcctacctgaactggtaccaacagaagcccggaaaagccccgaagcttctcatctacgccgcctcgagcctgcagtcaggagtgccctcacggttctccggctccggttccggtactgatttcaccctgaccatttcctccctgcaaccggaggacttcgctacttactactgccagcagtcgtactccaccccctacactttcggacaaggcaccaaggtcgaaatcaagaccactaccccagcaccgaggccacccaccccggctcctaccatcgcctcccagcctctgtccctgcgtccggaggcatgtagacccgcagctggtggggccgtgcatacccggggtcttgacttcgcctgcgatatctacatttgggcccctctggctggtacttgcggggtcctgctgctttcactcgtgatcactctttactgtaagcgcggtcggaagaagctgctgtacatctttaagcaacccttcatgaggcctgtgcagactactcaagaggaggacggctgttcatgccggttcccagaggaggaggaaggcggctgcgaactgcgcgtgaaattcagccgcagcgcagatgctccagcctacaagcaggggcagaaccagctctacaacgaactcaatcttggtcggagagaggagtacgacgtgctggacaagcggagaggacgggacccagaaatgggcgggaagccgcgcagaaagaatccccaagagggcctgtacaacgagctccaaaaggataagatggcagaagcctatagcgagattggtatgaaaggggaacgcagaagaggcaaaggccacgacggactgtaccagggactcagcaccgccaccaaggacacctatgacgctcttcacatgcaggccctgccgcctcgg

SEQ ID NO: 1406 - protein, 246 aa, synthetic construct
  REGION 1..246: note = source = /note="Description of Artificial Sequence: Synthetic polypeptide"
QVQLVESGGGLVQPGRSLRLSCAASGFTFSNYAMSWVRQAPGKGLGWVSGISRSGENTYYADSVKGRFTISRDNSKNTLYLQMNSLRDEDTAVYYCARSPAHYYGGMDVWGQGTTVTVSSASGGGGSGGRASGGGGSDIVLTQSPGTLSLSPGERATLSCRASQSISSSFLAWYQQKPGQAPRLLIYGASRRATGIPDRFSGSGSGTDFTLTISRLEPEDSAVYYCQQYHSSPSWTFGQGTKLEIK

SEQ ID NO: 1407 - DNA, 738 bp, synthetic construct
  misc_feature 1..738: note = source = /note="Description of Artificial Sequence: Synthetic polynucleotide"
  source 1..738: mol_type = other DNA
caagtgcaactcgtggaatctggtggaggactcgtgcaacccggaagatcgcttagactgtcgtgtgccgccagcgggttcactttctcgaactacgcgatgtcctgggtccgccaggcacccggaaagggactcggttgggtgtccggcatttcccggtccggcgaaaatacctactacgccgactccgtgaagggccgcttcaccatctcaagggacaacagcaaaaacaccctgtacttgcaaatgaactccctgcgggatgaagatacagccgtgtactattgcgcccggtcgcctgcccattactacggcggaatggacgtctggggacagggaaccactgtgactgtcagcagcgcgtcgggtggcggcggctcagggggtcgggcctccggggggggagggtccgacatcgtgctgacccagtccccgggaaccctgagcctgagcccgggagagcgcgcgaccctgtcatgccgggcatcccagagcattagctcctcctttctcgcctggtatcagcagaagcccggacaggccccgaggctgctgatctacggcgctagcagaagggctaccggaatcccagaccggttctccggctccggttccgggaccgatttcacccttactatctcgcgcctggaacctgaggactccgccgtctactactgccagcagtaccactcatccccgtcgtggacgttcggacagggcaccaagctggagattaag

SEQ ID NO: 1408 - protein, 120 aa, synthetic construct
  REGION 1..120: note = source = /note="Description of Artificial Sequence: Synthetic polypeptide"
QVQLVESGGGLVQPGRSLRLSCAASGFTFSNYAMSWVRQAPGKGLGWVSGISRSGENTYYADSVKGRFTISRDNSKNTLYLQMNSLRDEDTAVYYCARSPAHYYGGMDVWGQGTTVTVSS

SEQ ID NO: 1409 - protein, 109 aa, synthetic construct
  REGION 1..109: note = source = /note="Description of Artificial Sequence: Synthetic polypeptide"
DIVLTQSPGTLSLSPGERATLSCRASQSISSSFLAWYQQKPGQAPRLLIYGASRRATGIPDRFSGSGSGTDFTLTISRLEPEDSAVYYCQQYHSSPSWTFGQGTKLEIK

SEQ ID NO: 1410 - protein, 490 aa, synthetic construct
  REGION 1..490: note = source = /note="Description of Artificial Sequence: Synthetic polypeptide"
MALPVTALLLPLALLLHAARPQVQLVESGGGLVQPGRSLRLSCAASGFTFSNYAMSWVRQAPGKGLGWVSGISRSGENTYYADSVKGRFTISRDNSKNTLYLQMNSLRDEDTAVYYCARSPAHYYGGMDVWGQGTTVTVSSASGGGGSGGRASGGGGSDIVLTQSPGTLSLSPGERATLSCRASQSISSSFLAWYQQKPGQAPRLLIYGASRRATGIPDRFSGSGSGTDFTLTISRLEPEDSAVYYCQQYHSSPSWTFGQGTKLEIKTTTPAPRPPTPAPTIASQPLSLRPEACRPAAGGAVHTRGLDFACDIYIWAPLAGTCGVLLLSLVITLYCKRGRKKLLYIFKQPFMRPVQTTQEEDGCSCRFPEEEEGGCELRVKFSRSADAPAYKQGQNQLYNELNLGRREEYDVLDKRRGRDPEMGGKPRRKNPQEGLYNELQKDKMAEAYSEIGMKGERRRGKGHDGLYQGLSTATKDTYDALHMQALPPR

SEQ ID NO: 1411 - DNA, 1470 bp, synthetic construct
  misc_feature 1..1470: note = source = /note="Description of Artificial Sequence: Synthetic polynucleotide"
  source 1..1470: mol_type = other DNA
atggccctccctgtcaccgccctgctgcttccgctggctcttctgctccacgccgctcggccccaagtgcaactcgtggaatctggtggaggactcgtgcaacccggaagatcgcttagactgtcgtgtgccgccagcgggttcactttctcgaactacgcgatgtcctgggtccgccaggcacccggaaagggactcggttgggtgtccggcatttcccggtccggcgaaaatacctactacgccgactccgtgaagggccgcttcaccatctcaagggacaacagcaaaaacaccctgtacttgcaaatgaactccctgcgggatgaagatacagccgtgtactattgcgcccggtcgcctgcccattactacggcggaatggacgtctggggacagggaaccactgtgactgtcagcagcgcgtcgggtggcggcggctcagggggtcgggcctccggggggggagggtccgacatcgtgctgacccagtccccgggaaccctgagcctgagcccgggagagcgcgcgaccctgtcatgccgggcatcccagagcattagctcctcctttctcgcctggtatcagcagaagcccggacaggccccgaggctgctgatctacggcgctagcagaagggctaccggaatcccagaccggttctccggctccggttccgggaccgatttcacccttactatctcgcgcctggaacctgaggactccgccgtctactactgccagcagtaccactcatccccgtcgtggacgttcggacagggcaccaagctggagattaagaccactaccccagcaccgaggccacccaccccggctcctaccatcgcctcccagcctctgtccctgcgtccggaggcatgtagacccgcagctggtggggccgtgcatacccggggtcttgacttcgcctgcgatatctacatttgggcccctctggctggtacttgcggggtcctgctgctttcactcgtgatcactctttactgtaagcgcggtcggaagaagctgctgtacatctttaagcaacccttcatgaggcctgtgcagactactcaagaggaggacggctgttcatgccggttcccagaggaggaggaaggcggctgcgaactgcgcgtgaaattcagccgcagcgcagatgctccagcctacaagcaggggcagaaccagctctacaacgaactcaatcttggtcggagagaggagtacgacgtgctggacaagcggagaggacgggacccagaaatgggcgggaagccgcgcagaaagaatccccaagagggcctgtacaacgagctccaaaaggataagatggcagaagcctatagcgagattggtatgaaaggggaacgcagaagaggcaaaggccacgacggactgtaccagggactcagcaccgccaccaaggacacctatgacgctcttcacatgcaggccctgccgcctcgg

SEQ ID NO: 1412 - protein, 244 aa, synthetic construct
  REGION 1..244: note = source = /note="Description of Artificial Sequence: Synthetic polypeptide"
QVQLVESGGGLVQPGRSLRLSCAASGFTFDDYAMHWVRQAPGKGLEWVSGISWNSGSIGYADSVKGRFTISRDNAKNSLYLQMNSLRAEDTALYYCSVHSFLAYWGQGTLVTVSSASGGGGSGGRASGGGGSDIVMTQTPLSLPVTPGEPASISCRSSQSLLHSNGYNYLDWYLQKPGQSPQLLIYLGSNRASGVPDRFSGSGSGTDFTLKISRVEAEDVGVYYCMQALQTPYTFGQGTKVEIK

SEQ ID NO: 1413 - DNA, 732 bp, synthetic construct
  misc_feature 1..732: note = source = /note="Description of Artificial Sequence: Synthetic polynucleotide"
  source 1..732: mol_type = other DNA
caagtgcaactcgtcgaatccggtggaggtctggtccaacctggtagaagcctgagactgtcgtgtgcggccagcggattcacctttgatgactatgctatgcactgggtgcggcaggccccaggaaagggcctggaatgggtgtcgggaattagctggaactccgggtccattggctacgccgactccgtgaagggccgcttcaccatctcccgcgacaacgcaaagaactccctgtacttgcaaatgaactcgctcagggctgaggataccgcgctgtactactgctccgtgcattccttcctggcctactggggacagggaactctggtcaccgtgtcgagcgcctccggcggcgggggctcgggtggacgggcctcgggcggaggggggtccgacatcgtgatgacccagaccccgctgagcttgcccgtgactcccggagagcctgcatccatctcctgccggtcatcccagtcccttctccactccaacggatacaactacctcgactggtacctccagaagccgggacagagccctcagcttctgatctacctggggtcaaatagagcctcaggagtgccggatcggttcagcggatctggttcgggaactgatttcactctgaagatttcccgcgtggaagccgaggacgtgggcgtctactactgtatgcaggcgctgcagaccccctataccttcggccaagggacgaaagtggagatcaag

SEQ ID NO: 1414 - protein, 115 aa, synthetic construct
  REGION 1..115: note = source = /note="Description of Artificial Sequence: Synthetic polypeptide"
QVQLVESGGGLVQPGRSLRLSCAASGFTFDDYAMHWVRQAPGKGLEWVSGISWNSGSIGYADSVKGRFTISRDNAKNSLYLQMNSLRAEDTALYYCSVHSFLAYWGQGTLVTVSS

SEQ ID NO: 1415 - protein, 112 aa, synthetic construct
  REGION 1..112: note = source = /note="Description of Artificial Sequence: Synthetic polypeptide"
DIVMTQTPLSLPVTPGEPASISCRSSQSLLHSNGYNYLDWYLQKPGQSPQLLIYLGSNRASGVPDRFSGSGSGTDFTLKISRVEAEDVGVYYCMQALQTPYTFGQGTKVEIK

SEQ ID NO: 1416 - protein, 488 aa, synthetic construct
  REGION 1..488: note = source = /note="Description of Artificial Sequence: Synthetic polypeptide"
MALPVTALLLPLALLLHAARPQVQLVESGGGLVQPGRSLRLSCAASGFTFDDYAMHWVRQAPGKGLEWVSGISWNSGSIGYADSVKGRFTISRDNAKNSLYLQMNSLRAEDTALYYCSVHSFLAYWGQGTLVTVSSASGGGGSGGRASGGGGSDIVMTQTPLSLPVTPGEPASISCRSSQSLLHSNGYNYLDWYLQKPGQSPQLLIYLGSNRASGVPDRFSGSGSGTDFTLKISRVEAEDVGVYYCMQALQTPYTFGQGTKVEIKTTTPAPRPPTPAPTIASQPLSLRPEACRPAAGGAVHTRGLDFACDIYIWAPLAGTCGVLLLSLVITLYCKRGRKKLLYIFKQPFMRPVQTTQEEDGCSCRFPEEEEGGCELRVKFSRSADAPAYKQGQNQLYNELNLGRREEYDVLDKRRGRDPEMGGKPRRKNPQEGLYNELQKDKMAEAYSEIGMKGERRRGKGHDGLYQGLSTATKDTYDALHMQALPPR

SEQ ID NO: 1417 - DNA, 1464 bp, synthetic construct
  misc_feature 1..1464: note = source = /note="Description of Artificial Sequence: Synthetic polynucleotide"
  source 1..1464: mol_type = other DNA
atggccctccctgtcaccgccctgctgcttccgctggctcttctgctccacgccgctcggccccaagtgcaactcgtcgaatccggtggaggtctggtccaacctggtagaagcctgagactgtcgtgtgcggccagcggattcacctttgatgactatgctatgcactgggtgcggcaggccccaggaaagggcctggaatgggtgtcgggaattagctggaactccgggtccattggctacgccgactccgtgaagggccgcttcaccatctcccgcgacaacgcaaagaactccctgtacttgcaaatgaactcgctcagggctgaggataccgcgctgtactactgctccgtgcattccttcctggcctactggggacagggaactctggtcaccgtgtcgagcgcctccggcggcgggggctcgggtggacgggcctcgggcggaggggggtccgacatcgtgatgacccagaccccgctgagcttgcccgtgactcccggagagcctgcatccatctcctgccggtcatcccagtcccttctccactccaacggatacaactacctcgactggtacctccagaagccgggacagagccctcagcttctgatctacctggggtcaaatagagcctcaggagtgccggatcggttcagcggatctggttcgggaactgatttcactctgaagatttcccgcgtggaagccgaggacgtgggcgtctactactgtatgcaggcgctgcagaccccctataccttcggccaagggacgaaagtggagatcaagaccactaccccagcaccgaggccacccaccccggctcctaccatcgcctcccagcctctgtccctgcgtccggaggcatgtagacccgcagctggtggggccgtgcatacccggggtcttgacttcgcctgcgatatctacatttgggcccctctggctggtacttgcggggtcctgctgctttcactcgtgatcactctttactgtaagcgcggtcggaagaagctgctgtacatctttaagcaacccttcatgaggcctgtgcagactactcaagaggaggacggctgttcatgccggttcccagaggaggaggaaggcggctgcgaactgcgcgtgaaattcagccgcagcgcagatgctccagcctacaagcaggggcagaaccagctctacaacgaactcaatcttggtcggagagaggagtacgacgtgctggacaagcggagaggacgggacccagaaatgggcgggaagccgcgcagaaagaatccccaagagggcctgtacaacgagctccaaaaggataagatggcagaagcctatagcgagattggtatgaaaggggaacgcagaagaggcaaaggccacgacggactgtaccagggactcagcaccgccaccaaggacacctatgacgctcttcacatgcaggccctgccgcctcgg

SEQ ID NO: 1418 - protein, 243 aa, synthetic construct
  REGION 1..243: note = source = /note="Description of Artificial Sequence: Synthetic polypeptide"
EVQLLESGGGLVQPGGSLRLSCAVSGFALSNHGMSWVRRAPGKGLEWVSGIVYSGSTYYAASVKGRFTISRDNSRNTLYLQMNSLRPEDTAIYYCSAHGGESDVWGQGTTVTVSSASGGGGSGGRASGGGGSDIVMTQTPLSLSVTPGQPASISCKSSQSLLRNDGKTPLYWYLQKAGQPPQLLIYEVSNRFSGVPDRFSGSGSGTDFTLKISRVEAEDVGAYYCMQNIQFPSFGGGTKLEIK

SEQ ID NO: 1419 - DNA, 729 bp, synthetic construct
  misc_feature 1..729: note = source = /note="Description of Artificial Sequence: Synthetic polynucleotide"
  source 1..729: mol_type = other DNA
gaagtgcaattgttggaatctggaggaggacttgtgcagcctggaggatcactgagactttcgtgtgcggtgtcaggcttcgccctgagcaaccacggcatgagctgggtgcggagagccccggggaagggtctggaatgggtgtccgggatcgtctactccggttcaacttactacgccgcaagcgtgaagggtcgcttcaccatttcccgcgataactcccggaacaccctgtacctccaaatgaactccctgcggcccgaggacaccgccatctactactgttccgcgcatggaggagagtccgatgtctggggacagggcactaccgtgaccgtgtcgagcgcctcggggggaggaggctccggcggtcgcgcctccggggggggtggcagcgacattgtgatgacgcagactccactctcgctgtccgtgaccccgggacagcccgcgtccatctcgtgcaagagctcccagagcctgctgaggaacgacggaaagactcctctgtattggtacctccagaaggctggacagcccccgcaactgctcatctacgaagtgtcaaatcgcttctccggggtgccggatcggttttccggctcgggatcgggcaccgacttcaccctgaaaatctccagggtcgaggccgaggacgtgggagcctactactgcatgcaaaacatccagttcccttccttcggcggcggcacaaagctggagattaag

SEQ ID NO: 1420 - protein, 115 aa, synthetic construct
  REGION 1..115: note = source = /note="Description of Artificial Sequence: Synthetic polypeptide"
EVQLLESGGGLVQPGGSLRLSCAVSGFALSNHGMSWVRRAPGKGLEWVSGIVYSGSTYYAASVKGRFTISRDNSRNTLYLQMNSLRPEDTAIYYCSAHGGESDVWGQGTTVTVSS

SEQ ID NO: 1421 - protein, 111 aa, synthetic construct
  REGION 1..111: note = source = /note="Description of Artificial Sequence: Synthetic polypeptide"
DIVMTQTPLSLSVTPGQPASISCKSSQSLLRNDGKTPLYWYLQKAGQPPQLLIYEVSNRFSGVPDRFSGSGSGTDFTLKISRVEAEDVGAYYCMQNIQFPSFGGGTKLEIK

SEQ ID NO: 1422 - protein, 487 aa, synthetic construct
  REGION 1..487: note = source = /note="Description of Artificial Sequence: Synthetic polypeptide"
MALPVTALLLPLALLLHAARPEVQLLESGGGLVQPGGSLRLSCAVSGFALSNHGMSWVRRAPGKGLEWVSGIVYSGSTYYAASVKGRFTISRDNSRNTLYLQMNSLRPEDTAIYYCSAHGGESDVWGQGTTVTVSSASGGGGSGGRASGGGGSDIVMTQTPLSLSVTPGQPASISCKSSQSLLRNDGKTPLYWYLQKAGQPPQLLIYEVSNRFSGVPDRFSGSGSGTDFTLKISRVEAEDVGAYYCMQNIQFPSFGGGTKLEIKTTTPAPRPPTPAPTIASQPLSLRPEACRPAAGGAVHTRGLDFACDIYIWAPLAGTCGVLLLSLVITLYCKRGRKKLLYIFKQPFMRPVQTTQEEDGCSCRFPEEEEGGCELRVKFSRSADAPAYKQGQNQLYNELNLGRREEYDVLDKRRGRDPEMGGKPRRKNPQEGLYNELQKDKMAEAYSEIGMKGERRRGKGHDGLYQGLSTATKDTYDALHMQALPPR

SEQ ID NO: 1423 - DNA, 1461 bp, synthetic construct
  misc_feature 1..1461: note = source = /note="Description of Artificial Sequence: Synthetic polynucleotide"
  source 1..1461: mol_type = other DNA
atggccctccctgtcaccgccctgctgcttccgctggctcttctgctccacgccgctcggcccgaagtgcaattgttggaatctggaggaggacttgtgcagcctggaggatcactgagactttcgtgtgcggtgtcaggcttcgccctgagcaaccacggcatgagctgggtgcggagagccccggggaagggtctggaatgggtgtccgggatcgtctactccggttcaacttactacgccgcaagcgtgaagggtcgcttcaccatttcccgcgataactcccggaacaccctgtacctccaaatgaactccctgcggcccgaggacaccgccatctactactgttccgcgcatggaggagagtccgatgtctggggacagggcactaccgtgaccgtgtcgagcgcctcggggggaggaggctccggcggtcgcgcctccggggggggtggcagcgacattgtgatgacgcagactccactctcgctgtccgtgaccccgggacagcccgcgtccatctcgtgcaagagctcccagagcctgctgaggaacgacggaaagactcctctgtattggtacctccagaaggctggacagcccccgcaactgctcatctacgaagtgtcaaatcgcttctccggggtgccggatcggttttccggctcgggatcgggcaccgacttcaccctgaaaatctccagggtcgaggccgaggacgtgggagcctactactgcatgcaaaacatccagttcccttccttcggcggcggcacaaagctggagattaagaccactaccccagcaccgaggccacccaccccggctcctaccatcgcctcccagcctctgtccctgcgtccggaggcatgtagacccgcagctggtggggccgtgcatacccggggtcttgacttcgcctgcgatatctacatttgggcccctctggctggtacttgcggggtcctgctgctttcactcgtgatcactctttactgtaagcgcggtcggaagaagctgctgtacatctttaagcaacccttcatgaggcctgtgcagactactcaagaggaggacggctgttcatgccggttcccagaggaggaggaaggcggctgcgaactgcgcgtgaaattcagccgcagcgcagatgctccagcctacaagcaggggcagaaccagctctacaacgaactcaatcttggtcggagagaggagtacgacgtgctggacaagcggagaggacgggacccagaaatgggcgggaagccgcgcagaaagaatccccaagagggcctgtacaacgagctccaaaaggataagatggcagaagcctatagcgagattggtatgaaaggggaacgcagaagaggcaaaggccacgacggactgtaccagggactcagcaccgccaccaaggacacctatgacgctcttcacatgcaggccctgccgcctcgg

SEQ ID NO: 1424 - protein, 249 aa, synthetic construct
  REGION 1..249: note = source = /note="Description of Artificial Sequence: Synthetic polypeptide"
QVQLVQSGAEVRKTGASVKVSCKASGYIFDNFGINWVRQAPGQGLEWMGWINPKNNNTNYAQKFQGRVTITADESTNTAYMEVSSLRSEDTAVYYCARGPYYYQSYMDVWGQGTMVTVSSASGGGGSGGRASGGGGSDIVMTQTPLSLPVTPGEPASISCRSSQSLLHSNGYNYLNWYLQKPGQSPQLLIYLGSKRASGVPDRFSGSGSGTDFTLHITRVGAEDVGVYYCMQALQTPYTFGQGTKLEIK

SEQ ID NO: 1425 - DNA, 747 bp, synthetic construct
  misc_feature 1..747: note = source = /note="Description of Artificial Sequence: Synthetic polynucleotide"
  source 1..747: mol_type = other DNA
caagtccaactcgtccagtccggcgcagaagtcagaaaaaccggtgctagcgtgaaagtgtcctgcaaggcctccggctacattttcgataacttcggaatcaactgggtcagacaggccccgggccaggggctggaatggatgggatggatcaaccccaagaacaacaacaccaactacgcacagaagttccagggccgcgtgactatcaccgccgatgaatcgaccaataccgcctacatggaggtgtcctccctgcggtcggaggacactgccgtgtattactgcgcgaggggcccatactactaccaaagctacatggacgtctggggacagggaaccatggtgaccgtgtcatccgcctccggtggtggaggctccggggggcgggcttcaggaggcggaggaagcgatattgtgatgacccagactccgcttagcctgcccgtgactcctggagaaccggcctccatttcctgccggtcctcgcaatcactcctgcattccaacggttacaactacctgaattggtacctccagaagcctggccagtcgccccagttgctgatctatctgggctcgaagcgcgcctccggggtgcctgaccggtttagcggatctgggagcggcacggacttcactctccacatcacccgcgtgggagcggaggacgtgggagtgtactactgtatgcaggcgctgcagactccgtacacattcggacagggcaccaagctggagatcaag

SEQ ID NO: 1426 - protein, 120 aa, synthetic construct
  REGION 1..120: note = source = /note="Description of Artificial Sequence: Synthetic polypeptide"
QVQLVQSGAEVRKTGASVKVSCKASGYIFDNFGINWVRQAPGQGLEWMGWINPKNNNTNYAQKFQGRVTITADESTNTAYMEVSSLRSEDTAVYYCARGPYYYQSYMDVWGQGTMVTVSS

SEQ ID NO: 1427 - protein, 112 aa, synthetic construct
  REGION 1..112: note = source = /note="Description of Artificial Sequence: Synthetic polypeptide"
DIVMTQTPLSLPVTPGEPASISCRSSQSLLHSNGYNYLNWYLQKPGQSPQLLIYLGSKRASGVPDRFSGSGSGTDFTLHITRVGAEDVGVYYCMQALQTPYTFGQGTKLEIK

SEQ ID NO: 1428 - protein, 493 aa, synthetic construct
  REGION 1..493: note = source = /note="Description of Artificial Sequence: Synthetic polypeptide"
MALPVTALLLPLALLLHAARPQVQLVQSGAEVRKTGASVKVSCKASGYIFDNFGINWVRQAPGQGLEWMGWINPKNNNTNYAQKFQGRVTITADESTNTAYMEVSSLRSEDTAVYYCARGPYYYQSYMDVWGQGTMVTVSSASGGGGSGGRASGGGGSDIVMTQTPLSLPVTPGEPASISCRSSQSLLHSNGYNYLNWYLQKPGQSPQLLIYLGSKRASGVPDRFSGSGSGTDFTLHITRVGAEDVGVYYCMQALQTPYTFGQGTKLEIKTTTPAPRPPTPAPTIASQPLSLRPEACRPAAGGAVHTRGLDFACDIYIWAPLAGTCGVLLLSLVITLYCKRGRKKLLYIFKQPFMRPVQTTQEEDGCSCRFPEEEEGGCELRVKFSRSADAPAYKQGQNQLYNELNLGRREEYDVLDKRRGRDPEMGGKPRRKNPQEGLYNELQKDKMAEAYSEIGMKGERRRGKGHDGLYQGLSTATKDTYDALHMQALPPR

SEQ ID NO: 1429 - DNA, 1479 bp, synthetic construct
  misc_feature 1..1479: note = source = /note="Description of Artificial Sequence: Synthetic polynucleotide"
  source 1..1479: mol_type = other DNA
atggccctccctgtcaccgccctgctgcttccgctggctcttctgctccacgccgctcggccccaagtccaactcgtccagtccggcgcagaagtcagaaaaaccggtgctagcgtgaaagtgtcctgcaaggcctccggctacattttcgataacttcggaatcaactgggtcagacaggccccgggccaggggctggaatggatgggatggatcaaccccaagaacaacaacaccaactacgcacagaagttccagggccgcgtgactatcaccgccgatgaatcgaccaataccgcctacatggaggtgtcctccctgcggtcggaggacactgccgtgtattactgcgcgaggggcccatactactaccaaagctacatggacgtctggggacagggaaccatggtgaccgtgtcatccgcctccggtggtggaggctccggggggcgggcttcaggaggcggaggaagcgatattgtgatgacccagactccgcttagcctgcccgtgactcctggagaaccggcctccatttcctgccggtcctcgcaatcactcctgcattccaacggttacaactacctgaattggtacctccagaagcctggccagtcgccccagttgctgatctatctgggctcgaagcgcgcctccggggtgcctgaccggtttagcggatctgggagcggcacggacttcactctccacatcacccgcgtgggagcggaggacgtgggagtgtactactgtatgcaggcgctgcagactccgtacacattcggacagggcaccaagctggagatcaagaccactaccccagcaccgaggccacccaccccggctcctaccatcgcctcccagcctctgtccctgcgtccggaggcatgtagacccgcagctggtggggccgtgcatacccggggtcttgacttcgcctgcgatatctacatttgggcccctctggctggtacttgcggggtcctgctgctttcactcgtgatcactctttactgtaagcgcggtcggaagaagctgctgtacatctttaagcaacccttcatgaggcctgtgcagactactcaagaggaggacggctgttcatgccggttcccagaggaggaggaaggcggctgcgaactgcgcgtgaaattcagccgcagcgcagatgctccagcctacaagcaggggcagaaccagctctacaacgaactcaatcttggtcggagagaggagtacgacgtgctggacaagcggagaggacgggacccagaaatgggcgggaagccgcgcagaaagaatccccaagagggcctgtacaacgagctccaaaaggataagatggcagaagcctatagcgagattggtatgaaaggggaacgcagaagaggcaaaggccacgacggactgtaccagggactcagcaccgccaccaaggacacctatgacgctcttcacatgcaggccctgccgcctcgg

SEQ ID NO: 1430 - protein, 246 aa, synthetic construct
  REGION 1..246: note = source = /note="Description of Artificial Sequence: Synthetic polypeptide"
QVQLQESGGGLVQPGGSLRLSCAASGFTFSSDAMTWVRQAPGKGLEWVSVISGSGGTTYYADSVKGRFTISRDNSKNTLYLQMNSLRAEDTAVYYCAKLDSSGYYYARGPRYWGQGTLVTVSSASGGGGSGGRASGGGGSDIQLTQSPSSLSASVGDRVTITCRASQSISSYLNWYQQKPGKAPKLLIYGASTLASGVPARFSGSGSGTHFTLTINSLQSEDSATYYCQQSYKRASFGQGTKVEIK

SEQ ID NO: 1431 - DNA, 738 bp, synthetic construct
  misc_feature 1..738: note = source = /note="Description of Artificial Sequence: Synthetic polynucleotide"
  source 1..738: mol_type = other DNA
caagtgcaacttcaagaatcaggcggaggactcgtgcagcccggaggatcattgcggctctcgtgcgccgcctcgggcttcaccttctcgagcgacgccatgacctgggtccgccaggccccggggaaggggctggaatgggtgtctgtgatttccggctccgggggaactacgtactacgccgattccgtgaaaggtcgcttcactatctcccgggacaacagcaagaacaccctttatctgcaaatgaattccctccgcgccgaggacaccgccgtgtactactgcgccaagctggactcctcgggctactactatgcccggggtccgagatactggggacagggaaccctcgtgaccgtgtcctccgcgtccggcggaggagggtcgggagggcgggcctccggcggcggcggttcggacatccagctgacccagtccccatcctcactgagcgcaagcgtgggcgacagagtcaccattacatgcagggcgtcccagagcatcagctcctacctgaactggtaccaacagaagcctggaaaggctcctaagctgttgatctacggggcttcgaccctggcatccggggtgcccgcgaggtttagcggaagcggtagcggcactcacttcactctgaccattaacagcctccagtccgaggattcagccacttactactgtcagcagtcctacaagcgggccagcttcggacagggcactaaggtcgagatcaag

SEQ ID NO: 1432 - protein, 123 aa, synthetic construct
  REGION 1..123: note = source = /note="Description of Artificial Sequence: Synthetic polypeptide"
QVQLQESGGGLVQPGGSLRLSCAASGFTFSSDAMTWVRQAPGKGLEWVSVISGSGGTTYYADSVKGRFTISRDNSKNTLYLQMNSLRAEDTAVYYCAKLDSSGYYYARGPRYWGQGTLVTVSS

SEQ ID NO: 1433 - protein, 106 aa, synthetic construct
  REGION 1..106: note = source = /note="Description of Artificial Sequence: Synthetic polypeptide"
DIQLTQSPSSLSASVGDRVTITCRASQSISSYLNWYQQKPGKAPKLLIYGASTLASGVPARFSGSGSGTHFTLTINSLQSEDSATYYCQQSYKRASFGQGTKVEIK

SEQ ID NO: 1434 - protein, 490 aa, synthetic construct
  REGION 1..490: note = source = /note="Description of Artificial Sequence: Synthetic polypeptide"
MALPVTALLLPLALLLHAARPQVQLQESGGGLVQPGGSLRLSCAASGFTFSSDAMTWVRQAPGKGLEWVSVISGSGGTTYYADSVKGRFTISRDNSKNTLYLQMNSLRAEDTAVYYCAKLDSSGYYYARGPRYWGQGTLVTVSSASGGGGSGGRASGGGGSDIQLTQSPSSLSASVGDRVTITCRASQSISSYLNWYQQKPGKAPKLLIYGASTLASGVPARFSGSGSGTHFTLTINSLQSEDSATYYCQQSYKRASFGQGTKVEIKTTTPAPRPPTPAPTIASQPLSLRPEACRPAAGGAVHTRGLDFACDIYIWAPLAGTCGVLLLSLVITLYCKRGRKKLLYIFKQPFMRPVQTTQEEDGCSCRFPEEEEGGCELRVKFSRSADAPAYKQGQNQLYNELNLGRREEYDVLDKRRGRDPEMGGKPRRKNPQEGLYNELQKDKMAEAYSEIGMKGERRRGKGHDGLYQGLSTATKDTYDALHMQALPPR

SEQ ID NO: 1435 - DNA, 1470 bp, synthetic construct
  misc_feature 1..1470: note = source = /note="Description of Artificial Sequence: Synthetic polynucleotide"
  source 1..1470: mol_type = other DNA
atggccctccctgtcaccgccctgctgcttccgctggctcttctgctccacgccgctcggccccaagtgcaacttcaagaatcaggcggaggactcgtgcagcccggaggatcattgcggctctcgtgcgccgcctcgggcttcaccttctcgagcgacgccatgacctgggtccgccaggccccggggaaggggctggaatgggtgtctgtgatttccggctccgggggaactacgtactacgccgattccgtgaaaggtcgcttcactatctcccgggacaacagcaagaacaccctttatctgcaaatgaattccctccgcgccgaggacaccgccgtgtactactgcgccaagctggactcctcgggctactactatgcccggggtccgagatactggggacagggaaccctcgtgaccgtgtcctccgcgtccggcggaggagggtcgggagggcgggcctccggcggcggcggttcggacatccagctgacccagtccccatcctcactgagcgcaagcgtgggcgacagagtcaccattacatgcagggcgtcccagagcatcagctcctacctgaactggtaccaacagaagcctggaaaggctcctaagctgttgatctacggggcttcgaccctggcatccggggtgcccgcgaggtttagcggaagcggtagcggcactcacttcactctgaccattaacagcctccagtccgaggattcagccacttactactgtcagcagtcctacaagcgggccagcttcggacagggcactaaggtcgagatcaagaccactaccccagcaccgaggccacccaccccggctcctaccatcgcctcccagcctctgtccctgcgtccggaggcatgtagacccgcagctggtggggccgtgcatacccggggtcttgacttcgcctgcgatatctacatttgggcccctctggctggtacttgcggggtcctgctgctttcactcgtgatcactctttactgtaagcgcggtcggaagaagctgctgtacatctttaagcaacccttcatgaggcctgtgcagactactcaagaggaggacggctgttcatgccggttcccagaggaggaggaaggcggctgcgaactgcgcgtgaaattcagccgcagcgcagatgctccagcctacaagcaggggcagaaccagctctacaacgaactcaatcttggtcggagagaggagtacgacgtgctggacaagcggagaggacgggacccagaaatgggcgggaagccgcgcagaaagaatccccaagagggcctgtacaacgagctccaaaaggataagatggcagaagcctatagcgagattggtatgaaaggggaacgcagaagaggcaaaggccacgacggactgtaccagggactcagcaccgccaccaaggacacctatgacgctcttcacatgcaggccctgccgcctcgg

SEQ ID NO: 1436 - protein, 247 aa, synthetic construct
  REGION 1..247: note = source = /note="Description of Artificial Sequence: Synthetic polypeptide"
QVQLVQSGAEVKKPGASVKVSCKASGYTFSNYGITWVRQAPGQGLEWMGWISAYNGNTNYAQKFQGRVTMTRNTSISTAYMELSSLRSEDTAVYYCARGPYYYYMDVWGKGTMVTVSSASGGGGSGGRASGGGGSEIVMTQSPLSLPVTPGEPASISCRSSQSLLYSNGYNYVDWYLQKPGQSPQLLIYLGSNRASGVPDRFSGSGSGTDFKLQISRVEAEDVGIYYCMQGRQFPYSFGQGTKVEIK

SEQ ID NO: 1437 - DNA, 741 bp, synthetic construct
  misc_feature 1..741: note = source = /note="Description of Artificial Sequence: Synthetic polynucleotide"
  source 1..741: mol_type = other DNA
caagtccaactggtccagagcggtgcagaagtgaagaagcccggagcgagcgtgaaagtgtcctgcaaggcttccgggtacaccttctccaactacggcatcacttgggtgcgccaggccccgggacagggcctggaatggatggggtggatttccgcgtacaacggcaatacgaactacgctcagaagttccagggtagagtgaccatgactaggaacacctccatttccaccgcctacatggaactgtcctccctgcggagcgaggacaccgccgtgtactattgcgcccggggaccatactactactacatggatgtctgggggaaggggactatggtcaccgtgtcatccgcctcgggaggcggcggatcaggaggacgcgcctctggtggtggaggatcggagatcgtgatgacccagagccctctctccttgcccgtgactcctggggagcccgcatccatttcatgccggagctcccagtcacttctctactccaacggctataactacgtggattggtacctccaaaagccgggccagagcccgcagctgctgatctacctgggctcgaacagggccagcggagtgcctgaccggttctccgggtcgggaagcgggaccgacttcaagctgcaaatctcgagagtggaggccgaggacgtgggaatctactactgtatgcagggccgccagtttccgtactcgttcggacagggcaccaaagtggaaatcaag

SEQ ID NO: 1438 - protein, 118 aa, synthetic construct
  REGION 1..118: note = source = /note="Description of Artificial Sequence: Synthetic polypeptide"
QVQLVQSGAEVKKPGASVKVSCKASGYTFSNYGITWVRQAPGQGLEWMGWISAYNGNTNYAQKFQGRVTMTRNTSISTAYMELSSLRSEDTAVYYCARGPYYYYMDVWGKGTMVTVSS

SEQ ID NO: 1439 - protein, 112 aa, synthetic construct
  REGION 1..112: note = source = /note="Description of Artificial Sequence: Synthetic polypeptide"
EIVMTQSPLSLPVTPGEPASISCRSSQSLLYSNGYNYVDWYLQKPGQSPQLLIYLGSNRASGVPDRFSGSGSGTDFKLQISRVEAEDVGIYYCMQGRQFPYSFGQGTKVEIK

SEQ ID NO: 1440 - protein, 491 aa, synthetic construct
  REGION 1..491: note = source = /note="Description of Artificial Sequence: Synthetic polypeptide"
MALPVTALLLPLALLLHAARPQVQLVQSGAEVKKPGASVKVSCKASGYTFSNYGITWVRQAPGQGLEWMGWISAYNGNTNYAQKFQGRVTMTRNTSISTAYMELSSLRSEDTAVYYCARGPYYYYMDVWGKGTMVTVSSASGGGGSGGRASGGGGSEIVMTQSPLSLPVTPGEPASISCRSSQSLLYSNGYNYVDWYLQKPGQSPQLLIYLGSNRASGVPDRFSGSGSGTDFKLQISRVEAEDVGIYYCMQGRQFPYSFGQGTKVEIKTTTPAPRPPTPAPTIASQPLSLRPEACRPAAGGAVHTRGLDFACDIYIWAPLAGTCGVLLLSLVITLYCKRGRKKLLYIFKQPFMRPVQTTQEEDGCSCRFPEEEEGGCELRVKFSRSADAPAYKQGQNQLYNELNLGRREEYDVLDKRRGRDPEMGGKPRRKNPQEGLYNELQKDKMAEAYSEIGMKGERRRGKGHDGLYQGLSTATKDTYDALHMQALPPR

SEQ ID NO: 1441 - DNA, 1473 bp, synthetic construct
  misc_feature 1..1473: note = source = /note="Description of Artificial Sequence: Synthetic polynucleotide"
  source 1..1473: mol_type = other DNA
atggccctccctgtcaccgccctgctgcttccgctggctcttctgctccacgccgctcggccccaagtccaactggtccagagcggtgcagaagtgaagaagcccggagcgagcgtgaaagtgtcctgcaaggcttccgggtacaccttctccaactacggcatcacttgggtgcgccaggccccgggacagggcctggaatggatggggtggatttccgcgtacaacggcaatacgaactacgctcagaagttccagggtagagtgaccatgactaggaacacctccatttccaccgcctacatggaactgtcctccctgcggagcgaggacaccgccgtgtactattgcgcccggggaccatactactactacatggatgtctgggggaaggggactatggtcaccgtgtcatccgcctcgggaggcggcggatcaggaggacgcgcctctggtggtggaggatcggagatcgtgatgacccagagccctctctccttgcccgtgactcctggggagcccgcatccatttcatgccggagctcccagtcacttctctactccaacggctataactacgtggattggtacctccaaaagccgggccagagcccgcagctgctgatctacctgggctcgaacagggccagcggagtgcctgaccggttctccgggtcgggaagcgggaccgacttcaagctgcaaatctcgagagtggaggccgaggacgtgggaatctactactgtatgcagggccgccagtttccgtactcgttcggacagggcaccaaagtggaaatcaagaccactaccccagcaccgaggccacccaccccggctcctaccatcgcctcccagcctctgtccctgcgtccggaggcatgtagacccgcagctggtggggccgtgcatacccggggtcttgacttcgcctgcgatatctacatttgggcccctctggctggtacttgcggggtcctgctgctttcactcgtgatcactctttactgtaagcgcggtcggaagaagctgctgtacatctttaagcaacccttcatgaggcctgtgcagactactcaagaggaggacggctgttcatgccggttcccagaggaggaggaaggcggctgcgaactgcgcgtgaaattcagccgcagcgcagatgctccagcctacaagcaggggcagaaccagctctacaacgaactcaatcttggtcggagagaggagtacgacgtgctggacaagcggagaggacgggacccagaaatgggcgggaagccgcgcagaaagaatccccaagagggcctgtacaacgagctccaaaaggataagatggcagaagcctatagcgagattggtatgaaaggggaacgcagaagaggcaaaggccacgacggactgtaccagggactcagcaccgccaccaaggacacctatgacgctcttcacatgcaggccctgccgcctcgg

SEQ ID NO: 1442 - protein, 238 aa, synthetic construct
  REGION 1..238: note = source = /note="Description of Artificial Sequence: Synthetic polypeptide"
EVQLLETGGGLVQPGGSLRLSCAVSGFALSNHGMSWVRRAPGKGLEWVSGIVYSGSTYYAASVKGRFTISRDNSRNTLYLQMNSLRPEDTAIYYCSAHGGESDVWGQGTTVTVSSASGGGGSGGRASGGGGSEIVLTQSPATLSVSPGESATLSCRASQSVSSNLAWYQQKPGQAPRLLIYGASTRASGIPDRFSGSGSGTDFTLTISSLQAEDVAVYYCQQYGSSLTFGGGTKVEIK

SEQ ID NO: 1443 - DNA, 714 bp, synthetic construct
  misc_feature 1..714: note = source = /note="Description of Artificial Sequence: Synthetic polynucleotide"
  source 1..714: mol_type = other DNA
gaagtgcaattgctcgaaactggaggaggtctggtgcaacctggaggatcacttcgcctgtcctgcgccgtgtcgggctttgccctgtccaaccatggaatgagctgggtccgccgcgcgccggggaagggcctcgaatgggtgtccggcatcgtctactccggctccacctactacgccgcgtccgtgaagggccggttcacgatttcacgggacaactcgcggaacaccctgtacctccaaatgaattcccttcggccggaggatactgccatctactactgctccgcccacggtggcgaatccgacgtctggggccagggaaccaccgtgaccgtgtccagcgcgtccgggggaggaggaagcgggggtagagcatcgggtggaggcggatcagagatcgtgctgacccagtcccccgccaccttgagcgtgtcaccaggagagtccgccaccctgtcatgccgcgccagccagtccgtgtcctccaacctggcttggtaccagcagaagccggggcaggcccctagactcctgatctatggggcgtcgacccgggcatctggaattcccgataggttcagcggatcgggctcgggcactgacttcactctgaccatctcctcgctgcaagccgaggacgtggctgtgtactactgtcagcagtacggaagctccctgactttcggtggcgggaccaaagtcgagattaag

SEQ ID NO: 1444 - protein, 115 aa, synthetic construct
  REGION 1..115: note = source = /note="Description of Artificial Sequence: Synthetic polypeptide"
EVQLLETGGGLVQPGGSLRLSCAVSGFALSNHGMSWVRRAPGKGLEWVSGIVYSGSTYYAASVKGRFTISRDNSRNTLYLQMNSLRPEDTAIYYCSAHGGESDVWGQGTTVTVSS

SEQ ID NO: 1445 - protein, 106 aa, synthetic construct
  REGION 1..106: note = source = /note="Description of Artificial Sequence: Synthetic polypeptide"
EIVLTQSPATLSVSPGESATLSCRASQSVSSNLAWYQQKPGQAPRLLIYGASTRASGIPDRFSGSGSGTDFTLTISSLQAEDVAVYYCQQYGSSLTFGGGTKVEIK

SEQ ID NO: 1446 - protein, 482 aa, synthetic construct
  REGION 1..482: note = source = /note="Description of Artificial Sequence: Synthetic polypeptide"
MALPVTALLLPLALLLHAARPEVQLLETGGGLVQPGGSLRLSCAVSGFALSNHGMSWVRRAPGKGLEWVSGIVYSGSTYYAASVKGRFTISRDNSRNTLYLQMNSLRPEDTAIYYCSAHGGESDVWGQGTTVTVSSASGGGGSGGRASGGGGSEIVLTQSPATLSVSPGESATLSCRASQSVSSNLAWYQQKPGQAPRLLIYGASTRASGIPDRFSGSGSGTDFTLTISSLQAEDVAVYYCQQYGSSLTFGGGTKVEIKTTTPAPRPPTPAPTIASQPLSLRPEACRPAAGGAVHTRGLDFACDIYIWAPLAGTCGVLLLSLVITLYCKRGRKKLLYIFKQPFMRPVQTTQEEDGCSCRFPEEEEGGCELRVKFSRSADAPAYKQGQNQLYNELNLGRREEYDVLDKRRGRDPEMGGKPRRKNPQEGLYNELQKDKMAEAYSEIGMKGERRRGKGHDGLYQGLSTATKDTYDALHMQALPPR

SEQ ID NO: 1447 - DNA, 1446 bp, synthetic construct
  misc_feature 1..1446: note = source = /note="Description of Artificial Sequence: Synthetic polynucleotide"
  source 1..1446: mol_type = other DNA
atggccctccctgtcaccgccctgctgcttccgctggctcttctgctccacgccgctcggcccgaagtgcaattgctcgaaactggaggaggtctggtgcaacctggaggatcacttcgcctgtcctgcgccgtgtcgggctttgccctgtccaaccatggaatgagctgggtccgccgcgcgccggggaagggcctcgaatgggtgtccggcatcgtctactccggctccacctactacgccgcgtccgtgaagggccggttcacgatttcacgggacaactcgcggaacaccctgtacctccaaatgaattcccttcggccggaggatactgccatctactactgctccgcccacggtggcgaatccgacgtctggggccagggaaccaccgtgaccgtgtccagcgcgtccgggggaggaggaagcgggggtagagcatcgggtggaggcggatcagagatcgtgctgacccagtcccccgccaccttgagcgtgtcaccaggagagtccgccaccctgtcatgccgcgccagccagtccgtgtcctccaacctggcttggtaccagcagaagccggggcaggcccctagactcctgatctatggggcgtcgacccgggcatctggaattcccgataggttcagcggatcgggctcgggcactgacttcactctgaccatctcctcgctgcaagccgaggacgtggctgtgtactactgtcagcagtacggaagctccctgactttcggtggcgggaccaaagtcgagattaagaccactaccccagcaccgaggccacccaccccggctcctaccatcgcctcccagcctctgtccctgcgtccggaggcatgtagacccgcagctggtggggccgtgcatacccggggtcttgacttcgcctgcgatatctacatttgggcccctctggctggtacttgcggggtcctgctgctttcactcgtgatcactctttactgtaagcgcggtcggaagaagctgctgtacatctttaagcaacccttcatgaggcctgtgcagactactcaagaggaggacggctgttcatgccggttcccagaggaggaggaaggcggctgcgaactgcgcgtgaaattcagccgcagcgcagatgctccagcctacaagcaggggcagaaccagctctacaacgaactcaatcttggtcggagagaggagtacgacgtgctggacaagcggagaggacgggacccagaaatgggcgggaagccgcgcagaaagaatccccaagagggcctgtacaacgagctccaaaaggataagatggcagaagcctatagcgagattggtatgaaaggggaacgcagaagaggcaaaggccacgacggactgtaccagggactcagcaccgccaccaaggacacctatgacgctcttcacatgcaggccctgccgcctcgg

SEQ ID NO: 1448 - protein, 239 aa, synthetic construct
  REGION 1..239: note = source = /note="Description of Artificial Sequence: Synthetic polypeptide"
EVQLVETGGGLVQPGGSLRLSCAVSGFALSNHGMSWVRRAPGKGLEWVSGIVYSGSTYYAASVKGRFTISRDNSRNTLYLQMNSLRPEDTAIYYCSAHGGESDVWGQGTTVTVSSASGGGGSGGRASGGGGSEIVMTQSPATLSVSPGERATLSCRASQSVSSKLAWYQQKPGQAPRLLMYGASIRATGIPDRFSGSGSGTEFTLTISSLEPEDFAVYYCQQYGSSSWTFGQGTKVEIK

SEQ ID NO: 1449 - DNA, 717 bp, synthetic construct
  misc_feature 1..717: note = source = /note="Description of Artificial Sequence: Synthetic polynucleotide"
  source 1..717: mol_type = other DNA
gaagtgcaattggtggaaactggaggaggacttgtgcaacctggaggatcattgagactgagctgcgcagtgtcgggattcgccctgagcaaccatggaatgtcctgggtcagaagggcccctggaaaaggcctcgaatgggtgtcagggatcgtgtactccggttccacttactacgccgcctccgtgaaggggcgcttcactatctcacgggataactcccgcaataccctgtacctccaaatgaacagcctgcggccggaggataccgccatctactactgttccgcccacggtggagagtctgacgtctggggccagggaactaccgtgaccgtgtcctccgcgtccggcggtggagggagcggcggccgcgccagcggcggcggaggctccgagatcgtgatgacccagagccccgctactctgtcggtgtcgcccggagaaagggcgaccctgtcctgccgggcgtcgcagtccgtgagcagcaagctggcttggtaccagcagaagccgggccaggcaccacgcctgcttatgtacggtgcctccattcgggccaccggaatcccggaccggttctcggggtcggggtccggtaccgagttcacactgaccatttcctcgctcgagcccgaggactttgccgtctattactgccagcagtacggctcctcctcatggacgttcggccaggggaccaaggtcgaaatcaag

SEQ ID NO: 1450 - protein, 115 aa, synthetic construct
  REGION 1..115: note = source = /note="Description of Artificial Sequence: Synthetic polypeptide"
EVQLVETGGGLVQPGGSLRLSCAVSGFALSNHGMSWVRRAPGKGLEWVSGIVYSGSTYYAASVKGRFTISRDNSRNTLYLQMNSLRPEDTAIYYCSAHGGESDVWGQGTTVTVSS

SEQ ID NO: 1451 - protein, 107 aa, synthetic construct
  REGION 1..107: note = source = /note="Description of Artificial Sequence: Synthetic polypeptide"
EIVMTQSPATLSVSPGERATLSCRASQSVSSKLAWYQQKPGQAPRLLMYGASIRATGIPDRFSGSGSGTEFTLTISSLEPEDFAVYYCQQYGSSSWTFGQGTKVEIK

SEQ ID NO: 1452 - protein, 483 aa, synthetic construct
  REGION 1..483: note = source = /note="Description of Artificial Sequence: Synthetic polypeptide"
MALPVTALLLPLALLLHAARPEVQLVETGGGLVQPGGSLRLSCAVSGFALSNHGMSWVRRAPGKGLEWVSGIVYSGSTYYAASVKGRFTISRDNSRNTLYLQMNSLRPEDTAIYYCSAHGGESDVWGQGTTVTVSSASGGGGSGGRASGGGGSEIVMTQSPATLSVSPGERATLSCRASQSVSSKLAWYQQKPGQAPRLLMYGASIRATGIPDRFSGSGSGTEFTLTISSLEPEDFAVYYCQQYGSSSWTFGQGTKVEIKTTTPAPRPPTPAPTIASQPLSLRPEACRPAAGGAVHTRGLDFACDIYIWAPLAGTCGVLLLSLVITLYCKRGRKKLLYIFKQPFMRPVQTTQEEDGCSCRFPEEEEGGCELRVKFSRSADAPAYKQGQNQLYNELNLGRREEYDVLDKRRGRDPEMGGKPRRKNPQEGLYNELQKDKMAEAYSEIGMKGERRRGKGHDGLYQGLSTATKDTYDALHMQALPPR

SEQ ID NO: 1453 - DNA, 1449 bp, synthetic construct
  misc_feature 1..1449: note = source = /note="Description of Artificial Sequence: Synthetic polynucleotide"
  source 1..1449: mol_type = other DNA
atggccctccctgtcaccgccctgctgcttccgctggctcttctgctccacgccgctcggcccgaagtgcaattggtggaaactggaggaggacttgtgcaacctggaggatcattgagactgagctgcgcagtgtcgggattcgccctgagcaaccatggaatgtcctgggtcagaagggcccctggaaaaggcctcgaatgggtgtcagggatcgtgtactccggttccacttactacgccgcctccgtgaaggggcgcttcactatctcacgggataactcccgcaataccctgtacctccaaatgaacagcctgcggccggaggataccgccatctactactgttccgcccacggtggagagtctgacgtctggggccagggaactaccgtgaccgtgtcctccgcgtccggcggtggagggagcggcggccgcgccagcggcggcggaggctccgagatcgtgatgacccagagccccgctactctgtcggtgtcgcccggagaaagggcgaccctgtcctgccgggcgtcgcagtccgtgagcagcaagctggcttggtaccagcagaagccgggccaggcaccacgcctgcttatgtacggtgcctccattcgggccaccggaatcccggaccggttctcggggtcggggtccggtaccgagttcacactgaccatttcctcgctcgagcccgaggactttgccgtctattactgccagcagtacggctcctcctcatggacgttcggccaggggaccaaggtcgaaatcaagaccactaccccagcaccgaggccacccaccccggctcctaccatcgcctcccagcctctgtccctgcgtccggaggcatgtagacccgcagctggtggggccgtgcatacccggggtcttgacttcgcctgcgatatctacatttgggcccctctggctggtacttgcggggtcctgctgctttcactcgtgatcactctttactgtaagcgcggtcggaagaagctgctgtacatctttaagcaacccttcatgaggcctgtgcagactactcaagaggaggacggctgttcatgccggttcccagaggaggaggaaggcggctgcgaactgcgcgtgaaattcagccgcagcgcagatgctccagcctacaagcaggggcagaaccagctctacaacgaactcaatcttggtcggagagaggagtacgacgtgctggacaagcggagaggacgggacccagaaatgggcgggaagccgcgcagaaagaatccccaagagggcctgtacaacgagctccaaaaggataagatggcagaagcctatagcgagattggtatgaaaggggaacgcagaagaggcaaaggccacgacggactgtaccagggactcagcaccgccaccaaggacacctatgacgctcttcacatgcaggccctgccgcctcgg

SEQ ID NO: 1454 - protein, 241 aa, synthetic construct
  REGION 1..241: note = source = /note="Description of Artificial Sequence: Synthetic polypeptide"
EVQLVETGGGVVQPGGSLRLSCAVSGFALSNHGMSWVRRAPGKGLEWVSGIVYSGSTYYAASVKGRFTISRDNSRNTLYLQMNSLRPEDTAIYYCSAHGGESDVWGQGTTVTVSSASGGGGSGGRASGGGGSEIVLTQSPGTLSLSPGERATLSCRASQSVGSTNLAWYQQKPGQAPRLLIYDASNRATGIPDRFSGGGSGTDFTLTISRLEPEDFAVYYCQQYGSSPPWTFGQGTKVEIK

SEQ ID NO: 1455 - DNA, 723 bp, synthetic construct
  misc_feature 1..723: note = source = /note="Description of Artificial Sequence: Synthetic polynucleotide"
  source 1..723: mol_type = other DNA
gaagtgcaattggtggagactggaggaggagtggtgcaacctggaggaagcctgagactgtcatgcgcggtgtcgggcttcgccctctccaaccacggaatgtcctgggtccgccgggcccctgggaaaggacttgaatgggtgtccggcatcgtgtactcgggttccacctactacgcggcctcagtgaagggccggtttactattagccgcgacaactccagaaacacactgtacctccaaatgaactcgctgcggccggaagataccgctatctactactgctccgcccatgggggagagtcggacgtctggggacagggcaccactgtcactgtgtccagcgcttccggcggtggtggaagcgggggacgggcctcaggaggcggtggcagcgagattgtgctgacccagtcccccgggaccctgagcctgtccccgggagaaagggccaccctctcctgtcgggcatcccagtccgtggggtctactaaccttgcatggtaccagcagaagcccggccaggcccctcgcctgctgatctacgacgcgtccaatagagccaccggcatcccggatcgcttcagcggaggcggatcgggcaccgacttcaccctcaccatttcaaggctggaaccggaggacttcgccgtgtactactgccagcagtatggttcgtccccaccctggacgttcggccaggggactaaggtcgagatcaag

SEQ ID NO: 1456 - protein, 115 aa, synthetic construct
  REGION 1..115: note = source = /note="Description of Artificial Sequence: Synthetic polypeptide"
EVQLVETGGGVVQPGGSLRLSCAVSGFALSNHGMSWVRRAPGKGLEWVSGIVYSGSTYYAASVKGRFTISRDNSRNTLYLQMNSLRPEDTAIYYCSAHGGESDVWGQGTTVTVSS

SEQ ID NO: 1457 - protein, 109 aa, synthetic construct
  REGION 1..109: note = source = /note="Description of Artificial Sequence: Synthetic polypeptide"
EIVLTQSPGTLSLSPGERATLSCRASQSVGSTNLAWYQQKPGQAPRLLIYDASNRATGIPDRFSGGGSGTDFTLTISRLEPEDFAVYYCQQYGSSPPWTFGQGTKVEIK

SEQ ID NO: 1458 - protein, 485 aa, synthetic construct
  REGION 1..485: note = source = /note="Description of Artificial Sequence: Synthetic polypeptide"
MALPVTALLLPLALLLHAARPEVQLVETGGGVVQPGGSLRLSCAVSGFALSNHGMSWVRRAPGKGLEWVSGIVYSGSTYYAASVKGRFTISRDNSRNTLYLQMNSLRPEDTAIYYCSAHGGESDVWGQGTTVTVSSASGGGGSGGRASGGGGSEIVLTQSPGTLSLSPGERATLSCRASQSVGSTNLAWYQQKPGQAPRLLIYDASNRATGIPDRFSGGGSGTDFTLTISRLEPEDFAVYYCQQYGSSPPWTFGQGTKVEIKTTTPAPRPPTPAPTIASQPLSLRPEACRPAAGGAVHTRGLDFACDIYIWAPLAGTCGVLLLSLVITLYCKRGRKKLLYIFKQPFMRPVQTTQEEDGCSCRFPEEEEGGCELRVKFSRSADAPAYKQGQNQLYNELNLGRREEYDVLDKRRGRDPEMGGKPRRKNPQEGLYNELQKDKMAEAYSEIGMKGERRRGKGHDGLYQGLSTATKDTYDALHMQALPPR

SEQ ID NO: 1459 - DNA, 1455 bp, synthetic construct
  misc_feature 1..1455: note = source = /note="Description of Artificial Sequence: Synthetic polynucleotide"
  source 1..1455: mol_type = other DNA
atggccctccctgtcaccgccctgctgcttccgctggctcttctgctccacgccgctcggcccgaagtgcaattggtggagactggaggaggagtggtgcaacctggaggaagcctgagactgtcatgcgcggtgtcgggcttcgccctctccaaccacggaatgtcctgggtccgccgggcccctgggaaaggacttgaatgggtgtccggcatcgtgtactcgggttccacctactacgcggcctcagtgaagggccggtttactattagccgcgacaactccagaaacacactgtacctccaaatgaactcgctgcggccggaagataccgctatctactactgctccgcccatgggggagagtcggacgtctggggacagggcaccactgtcactgtgtccagcgcttccggcggtggtggaagcgggggacgggcctcaggaggcggtggcagcgagattgtgctgacccagtcccccgggaccctgagcctgtccccgggagaaagggccaccctctcctgtcgggcatcccagtccgtggggtctactaaccttgcatggtaccagcagaagcccggccaggcccctcgcctgctgatctacgacgcgtccaatagagccaccggcatcccggatcgcttcagcggaggcggatcgggcaccgacttcaccctcaccatttcaaggctggaaccggaggacttcgccgtgtactactgccagcagtatggttcgtccccaccctggacgttcggccaggggactaaggtcgagatcaagaccactaccccagcaccgaggccacccaccccggctcctaccatcgcctcccagcctctgtccctgcgtccggaggcatgtagacccgcagctggtggggccgtgcatacccggggtcttgacttcgcctgcgatatctacatttgggcccctctggctggtacttgcggggtcctgctgctttcactcgtgatcactctttactgtaagcgcggtcggaagaagctgctgtacatctttaagcaacccttcatgaggcctgtgcagactactcaagaggaggacggctgttcatgccggttcccagaggaggaggaaggcggctgcgaactgcgcgtgaaattcagccgcagcgcagatgctccagcctacaagcaggggcagaaccagctctacaacgaactcaatcttggtcggagagaggagtacgacgtgctggacaagcggagaggacgggacccagaaatgggcgggaagccgcgcagaaagaatccccaagagggcctgtacaacgagctccaaaaggataagatggcagaagcctatagcgagattggtatgaaaggggaacgcagaagaggcaaaggccacgacggactgtaccagggactcagcaccgccaccaaggacacctatgacgctcttcacatgcaggccctgccgcctcgg

SEQ ID NO: 1460 - protein, 239 aa, synthetic construct
  REGION 1..239: note = source = /note="Description of Artificial Sequence: Synthetic polypeptide"
QVQLVESGGGLVKPGGSLRLSCAASGFTFSDYYMSWIRQAPGKGLEWVSYISSSGSTIYYADSVKGRFTISRDNAKNSLYLQMNSLRAEDTAVYYCARESGDGMDVWGQGTTVTVSSASGGGGSGGRASGGGGSDIQMTQSPSSLSASVGDRVTITCRASQSISSYLNWYQQKPGKAPKLLIYAASSLQSGVPSRFSGSGSGTDFTLTISSLQPEDFATYYCQQSYTLAFGQGTKVDIK

SEQ ID NO: 1461 - DNA, 717 bp, synthetic construct
  misc_feature 1..717: note = source = /note="Description of Artificial Sequence: Synthetic polynucleotide"
  source 1..717: mol_type = other DNA
caagtgcaactcgtggaatctggtggaggactcgtgaaacctggaggatcattgagactgtcatgcgcggcctcgggattcacgttctccgattactacatgagctggattcgccaggctccggggaagggactggaatgggtgtcctacatttcctcatccggctccaccatctactacgcggactccgtgaaggggagattcaccattagccgcgataacgccaagaacagcctgtaccttcagatgaactccctgcgggctgaagatactgccgtctactactgcgcaagggagagcggagatgggatggacgtctggggacagggtaccactgtgaccgtgtcgtcggcctccggcggagggggttcgggtggaagggccagcggcggcggaggcagcgacatccagatgacccagtccccctcatcgctgtccgcctccgtgggcgaccgcgtcaccatcacatgccgggcctcacagtcgatctcctcctacctcaattggtatcagcagaagcccggaaaggcccctaagcttctgatctacgcagcgtcctccctgcaatccggggtcccatctcggttctccggctcgggcagcggtaccgacttcactctgaccatctcgagcctgcagccggaggacttcgccacttactactgtcagcaaagctacaccctcgcgtttggccagggcaccaaagtggacatcaag

SEQ ID NO: 1462 - protein, 117 aa, synthetic construct
  REGION 1..117: note = source = /note="Description of Artificial Sequence: Synthetic polypeptide"
QVQLVESGGGLVKPGGSLRLSCAASGFTFSDYYMSWIRQAPGKGLEWVSYISSSGSTIYYADSVKGRFTISRDNAKNSLYLQMNSLRAEDTAVYYCARESGDGMDVWGQGTTVTVSS

SEQ ID NO: 1463 - protein, 105 aa, synthetic construct
  REGION 1..105: note = source = /note="Description of Artificial Sequence: Synthetic polypeptide"
DIQMTQSPSSLSASVGDRVTITCRASQSISSYLNWYQQKPGKAPKLLIYAASSLQSGVPSRFSGSGSGTDFTLTISSLQPEDFATYYCQQSYTLAFGQGTKVDIK

SEQ ID NO: 1464 - protein, 483 aa, synthetic construct
  REGION 1..483: note = source = /note="Description of Artificial Sequence: Synthetic polypeptide"
MALPVTALLLPLALLLHAARPQVQLVESGGGLVKPGGSLRLSCAASGFTFSDYYMSWIRQAPGKGLEWVSYISSSGSTIYYADSVKGRFTISRDNAKNSLYLQMNSLRAEDTAVYYCARESGDGMDVWGQGTTVTVSSASGGGGSGGRASGGGGSDIQMTQSPSSLSASVGDRVTITCRASQSISSYLNWYQQKPGKAPKLLIYAASSLQSGVPSRFSGSGSGTDFTLTISSLQPEDFATYYCQQSYTLAFGQGTKVDIKTTTPAPRPPTPAPTIASQPLSLRPEACRPAAGGAVHTRGLDFACDIYIWAPLAGTCGVLLLSLVITLYCKRGRKKLLYIFKQPFMRPVQTTQEEDGCSCRFPEEEEGGCELRVKFSRSADAPAYKQGQNQLYNELNLGRREEYDVLDKRRGRDPEMGGKPRRKNPQEGLYNELQKDKMAEAYSEIGMKGERRRGKGHDGLYQGLSTATKDTYDALHMQALPPR

SEQ ID NO: 1465 - DNA, 1449 bp, synthetic construct
  misc_feature 1..1449: note = source = /note="Description of Artificial Sequence: Synthetic polynucleotide"
  source 1..1449: mol_type = other DNA
atggccctccctgtcaccgccctgctgcttccgctggctcttctgctccacgccgctcggccccaagtgcaactcgtggaatctggtggaggactcgtgaaacctggaggatcattgagactgtcatgcgcggcctcgggattcacgttctccgattactacatgagctggattcgccaggctccggggaagggactggaatgggtgtcctacatttcctcatccggctccaccatctactacgcggactccgtgaaggggagattcaccattagccgcgataacgccaagaacagcctgtaccttcagatgaactccctgcgggctgaagatactgccgtctactactgcgcaagggagagcggagatgggatggacgtctggggacagggtaccactgtgaccgtgtcgtcggcctccggcggagggggttcgggtggaagggccagcggcggcggaggcagcgacatccagatgacccagtccccctcatcgctgtccgcctccgtgggcgaccgcgtcaccatcacatgccgggcctcacagtcgatctcctcctacctcaattggtatcagcagaagcccggaaaggcccctaagcttctgatctacgcagcgtcctccctgcaatccggggtcccatctcggttctccggctcgggcagcggtaccgacttcactctgaccatctcgagcctgcagccggaggacttcgccacttactactgtcagcaaagctacaccctcgcgtttggccagggcaccaaagtggacatcaagaccactaccccagcaccgaggccacccaccccggctcctaccatcgcctcccagcctctgtccctgcgtccggaggcatgtagacccgcagctggtggggccgtgcatacccggggtcttgacttcgcctgcgatatctacatttgggcccctctggctggtacttgcggggtcctgctgctttcactcgtgatcactctttactgtaagcgcggtcggaagaagctgctgtacatctttaagcaacccttcatgaggcctgtgcagactactcaagaggaggacggctgttcatgccggttcccagaggaggaggaaggcggctgcgaactgcgcgtgaaattcagccgcagcgcagatgctccagcctacaagcaggggcagaaccagctctacaacgaactcaatcttggtcggagagaggagtacgacgtgctggacaagcggagaggacgggacccagaaatgggcgggaagccgcgcagaaagaatccccaagagggcctgtacaacgagctccaaaaggataagatggcagaagcctatagcgagattggtatgaaaggggaacgcagaagaggcaaaggccacgacggactgtaccagggactcagcaccgccaccaaggacacctatgacgctcttcacatgcaggccctgccgcctcgg

SEQ ID NO: 1466 - protein, 246 aa, synthetic construct
  REGION 1..246: note = source = /note="Description of Artificial Sequence: Synthetic polypeptide"
QVQLVQSGGGLVKPGGSLRLSCAASGFTFSDYYMSWIRQAPGKGLEWVSYISSSGNTIYYADSVKGRFTISRDNAKNSLYLQMNSLRAEDTAVYYCARSTMVREDYWGQGTLVTVSSASGGGGSGGRASGGGGSDIVLTQSPLSLPVTLGQPASISCKSSESLVHNSGKTYLNWFHQRPGQSPRRLIYEVSNRDSGVPDRFTGSGSGTDFTLKISRVEAEDVGVYYCMQGTHWPGTFGQGTKLEIK

SEQ ID NO: 1467 - DNA, 738 bp, synthetic construct
  misc_feature 1..738: note = source = /note="Description of Artificial Sequence: Synthetic polynucleotide"
  source 1..738: mol_type = other DNA
caagtgcaactggtgcaaagcggaggaggattggtcaaacccggaggaagcctgagactgtcatgcgcggcctctggattcaccttctccgattactacatgtcatggatcagacaggccccggggaagggcctcgaatgggtgtcctacatctcgtcctccgggaacaccatctactacgccgacagcgtgaagggccgctttaccatttcccgcgacaacgcaaagaactcgctgtaccttcagatgaattccctgcgggctgaagataccgcggtgtactattgcgcccggtccactatggtccgggaggactactggggacagggcacactcgtgaccgtgtccagcgcgagcgggggtggaggcagcggtggacgcgcctccggcggcggcggttcagacatcgtgctgactcagtcgcccctgtcgctgccggtcaccctgggccaaccggcctcaattagctgcaagtcctcggagagcctggtgcacaactcaggaaagacttacctgaactggttccatcagcggcctggacagtccccacggaggctcatctatgaagtgtccaacagggattcgggggtgcccgaccgcttcactggctccgggtccggcaccgacttcaccttgaaaatctccagagtggaagccgaggacgtgggcgtgtactactgtatgcagggtacccactggcctggaacctttggacaaggaactaagctcgagattaag

SEQ ID NO: 1468 - protein, 117 aa, synthetic construct
  REGION 1..117: note = source = /note="Description of Artificial Sequence: Synthetic polypeptide"
QVQLVQSGGGLVKPGGSLRLSCAASGFTFSDYYMSWIRQAPGKGLEWVSYISSSGNTIYYADSVKGRFTISRDNAKNSLYLQMNSLRAEDTAVYYCARSTMVREDYWGQGTLVTVSS

SEQ ID NO: 1469 - protein, 112 aa, synthetic construct
  REGION 1..112: note = source = /note="Description of Artificial Sequence: Synthetic polypeptide"
DIVLTQSPLSLPVTLGQPASISCKSSESLVHNSGKTYLNWFHQRPGQSPRRLIYEVSNRDSGVPDRFTGSGSGTDFTLKISRVEAEDVGVYYCMQGTHWPGTFGQGTKLEIK

SEQ ID NO: 1470 - protein, 490 aa, synthetic construct
  REGION 1..490: note = source = /note="Description of Artificial Sequence: Synthetic polypeptide"
MALPVTALLLPLALLLHAARPQVQLVQSGGGLVKPGGSLRLSCAASGFTFSDYYMSWIRQAPGKGLEWVSYISSSGNTIYYADSVKGRFTISRDNAKNSLYLQMNSLRAEDTAVYYCARSTMVREDYWGQGTLVTVSSASGGGGSGGRASGGGGSDIVLTQSPLSLPVTLGQPASISCKSSESLVHNSGKTYLNWFHQRPGQSPRRLIYEVSNRDSGVPDRFTGSGSGTDFTLKISRVEAEDVGVYYCMQGTHWPGTFGQGTKLEIKTTTPAPRPPTPAPTIASQPLSLRPEACRPAAGGAVHTRGLDFACDIYIWAPLAGTCGVLLLSLVITLYCKRGRKKLLYIFKQPFMRPVQTTQEEDGCSCRFPEEEEGGCELRVKFSRSADAPAYKQGQNQLYNELNLGRREEYDVLDKRRGRDPEMGGKPRRKNPQEGLYNELQKDKMAEAYSEIGMKGERRRGKGHDGLYQGLSTATKDTYDALHMQALPPR

SEQ ID NO: 1471 - DNA, 1470 bp, synthetic construct
  misc_feature 1..1470: note = source = /note="Description of Artificial Sequence: Synthetic polynucleotide"
  source 1..1470: mol_type = other DNA
atggccctccctgtcaccgccctgctgcttccgctggctcttctgctccacgccgctcggccccaagtgcaactggtgcaaagcggaggaggattggtcaaacccggaggaagcctgagactgtcatgcgcggcctctggattcaccttctccgattactacatgtcatggatcagacaggccccggggaagggcctcgaatgggtgtcctacatctcgtcctccgggaacaccatctactacgccgacagcgtgaagggccgctttaccatttcccgcgacaacgcaaagaactcgctgtaccttcagatgaattccctgcgggctgaagataccgcggtgtactattgcgcccggtccactatggtccgggaggactactggggacagggcacactcgtgaccgtgtccagcgcgagcgggggtggaggcagcggtggacgcgcctccggcggcggcggttcagacatcgtgctgactcagtcgcccctgtcgctgccggtcaccctgggccaaccggcctcaattagctgcaagtcctcggagagcctggtgcacaactcaggaaagacttacctgaactggttccatcagcggcctggacagtccccacggaggctcatctatgaagtgtccaacagggattcgggggtgcccgaccgcttcactggctccgggtccggcaccgacttcaccttgaaaatctccagagtggaagccgaggacgtgggcgtgtactactgtatgcagggtacccactggcctggaacctttggacaaggaactaagctcgagattaagaccactaccccagcaccgaggccacccaccccggctcctaccatcgcctcccagcctctgtccctgcgtccggaggcatgtagacccgcagctggtggggccgtgcatacccggggtcttgacttcgcctgcgatatctacatttgggcccctctggctggtacttgcggggtcctgctgctttcactcgtgatcactctttactgtaagcgcggtcggaagaagctgctgtacatctttaagcaacccttcatgaggcctgtgcagactactcaagaggaggacggctgttcatgccggttcccagaggaggaggaaggcggctgcgaactgcgcgtgaaattcagccgcagcgcagatgctccagcctacaagcaggggcagaaccagctctacaacgaactcaatcttggtcggagagaggagtacgacgtgctggacaagcggagaggacgggacccagaaatgggcgggaagccgcgcagaaagaatccccaagagggcctgtacaacgagctccaaaaggataagatggcagaagcctatagcgagattggtatgaaaggggaacgcagaagaggcaaaggccacgacggactgtaccagggactcagcaccgccaccaaggacacctatgacgctcttcacatgcaggccctgccgcctcgg

SEQ ID NO: 1472 - protein, 239 aa, synthetic construct
  REGION 1..239: note = source = /note="Description of Artificial Sequence: Synthetic polypeptide"
QVQLVESGGGLVQPGGSLRLSCAVSGFALSNHGMSWVRRAPGKGLEWVSGIVYSGSTYYAASVKGRFTISRDNSRNTLYLQMNSLRPEDTAIYYCSAHGGESDVWGQGTTVTVSSASGGGGSGGRASGGGGSDIRLTQSPSPLSASVGDRVTITCQASEDINKFLNWYHQTPGKAPKLLIYDASTLQTGVPSRFSGSGSGTDFTLTINSLQPEDIGTYYCQQYESLPLTFGGGTKVEIK

SEQ ID NO: 1473 - DNA, 717 bp, synthetic construct
  misc_feature 1..717: note = source = /note="Description of Artificial Sequence: Synthetic polynucleotide"
  source 1..717: mol_type = other DNA
caagtgcaactcgtggaatctggtggaggactcgtgcaacccggtggaagccttaggctgtcgtgcgccgtcagcgggtttgctctgagcaaccatggaatgtcctgggtccgccgggcaccgggaaaagggctggaatgggtgtccggcatcgtgtacagcgggtcaacctattacgccgcgtccgtgaagggcagattcactatctcaagagacaacagccggaacaccctgtacttgcaaatgaattccctgcgccccgaggacaccgccatctactactgctccgcccacggaggagagtcggacgtgtggggccagggaacgactgtgactgtgtccagcgcatcaggagggggtggttcgggcggccgggcctcggggggaggaggttccgacattcggctgacccagtccccgtccccactgtcggcctccgtcggcgaccgcgtgaccatcacttgtcaggcgtccgaggacattaacaagttcctgaactggtaccaccagacccctggaaaggcccccaagctgctgatctacgatgcctcgacccttcaaactggagtgcctagccggttctccgggtccggctccggcactgatttcactctgaccatcaactcattgcagccggaagatatcgggacctactattgccagcagtacgaatccctcccgctcacattcggcgggggaaccaaggtcgagattaag

SEQ ID NO: 1474 - protein, 115 aa, synthetic construct
  REGION 1..115: note = source = /note="Description of Artificial Sequence: Synthetic polypeptide"
QVQLVESGGGLVQPGGSLRLSCAVSGFALSNHGMSWVRRAPGKGLEWVSGIVYSGSTYYAASVKGRFTISRDNSRNTLYLQMNSLRPEDTAIYYCSAHGGESDVWGQGTTVTVSS

SEQ ID NO: 1475 - protein, 107 aa, synthetic construct
  REGION 1..107: note = source = /note="Description of Artificial Sequence: Synthetic polypeptide"
DIRLTQSPSPLSASVGDRVTITCQASEDINKFLNWYHQTPGKAPKLLIYDASTLQTGVPSRFSGSGSGTDFTLTINSLQPEDIGTYYCQQYESLPLTFGGGTKVEIK

SEQ ID NO: 1476 - protein, 483 aa, synthetic construct
  REGION 1..483: note = source = /note="Description of Artificial Sequence: Synthetic polypeptide"
MALPVTALLLPLALLLHAARPQVQLVESGGGLVQPGGSLRLSCAVSGFALSNHGMSWVRRAPGKGLEWVSGIVYSGSTYYAASVKGRFTISRDNSRNTLYLQMNSLRPEDTAIYYCSAHGGESDVWGQGTTVTVSSASGGGGSGGRASGGGGSDIRLTQSPSPLSASVGDRVTITCQASEDINKFLNWYHQTPGKAPKLLIYDASTLQTGVPSRFSGSGSGTDFTLTINSLQPEDIGTYYCQQYESLPLTFGGGTKVEIKTTTPAPRPPTPAPTIASQPLSLRPEACRPAAGGAVHTRGLDFACDIYIWAPLAGTCGVLLLSLVITLYCKRGRKKLLYIFKQPFMRPVQTTQEEDGCSCRFPEEEEGGCELRVKFSRSADAPAYKQGQNQLYNELNLGRREEYDVLDKRRGRDPEMGGKPRRKNPQEGLYNELQKDKMAEAYSEIGMKGERRRGKGHDGLYQGLSTATKDTYDALHMQALPPR

SEQ ID NO: 1477 - DNA, 1449 bp, synthetic construct
  misc_feature 1..1449: note = source = /note="Description of Artificial Sequence: Synthetic polynucleotide"
  source 1..1449: mol_type = other DNA
atggccctccctgtcaccgccctgctgcttccgctggctcttctgctccacgccgctcggccccaagtgcaactcgtggaatctggtggaggactcgtgcaacccggtggaagccttaggctgtcgtgcgccgtcagcgggtttgctctgagcaaccatggaatgtcctgggtccgccgggcaccgggaaaagggctggaatgggtgtccggcatcgtgtacagcgggtcaacctattacgccgcgtccgtgaagggcagattcactatctcaagagacaacagccggaacaccctgtacttgcaaatgaattccctgcgccccgaggacaccgccatctactactgctccgcccacggaggagagtcggacgtgtggggccagggaacgactgtgactgtgtccagcgcatcaggagggggtggttcgggcggccgggcctcggggggaggaggttccgacattcggctgacccagtccccgtccccactgtcggcctccgtcggcgaccgcgtgaccatcacttgtcaggcgtccgaggacattaacaagttcctgaactggtaccaccagacccctggaaaggcccccaagctgctgatctacgatgcctcgacccttcaaactggagtgcctagccggttctccgggtccggctccggcactgatttcactctgaccatcaactcattgcagccggaagatatcgggacctactattgccagcagtacgaatccctcccgctcacattcggcgggggaaccaaggtcgagattaagaccactaccccagcaccgaggccacccaccccggctcctaccatcgcctcccagcctctgtccctgcgtccggaggcatgtagacccgcagctggtggggccgtgcatacccggggtcttgacttcgcctgcgatatctacatttgggcccctctggctggtacttgcggggtcctgctgctttcactcgtgatcactctttactgtaagcgcggtcggaagaagctgctgtacatctttaagcaacccttcatgaggcctgtgcagactactcaagaggaggacggctgttcatgccggttcccagaggaggaggaaggcggctgcgaactgcgcgtgaaattcagccgcagcgcagatgctccagcctacaagcaggggcagaaccagctctacaacgaactcaatcttggtcggagagaggagtacgacgtgctggacaagcggagaggacgggacccagaaatgggcgggaagccgcgcagaaagaatccccaagagggcctgtacaacgagctccaaaaggataagatggcagaagcctatagcgagattggtatgaaaggggaacgcagaagaggcaaaggccacgacggactgtaccagggactcagcaccgccaccaaggacacctatgacgctcttcacatgcaggccctgccgcctcgg

SEQ ID NO: 1478 - protein, 240 aa, synthetic construct
  REGION 1..240: note = source = /note="Description of Artificial Sequence: Synthetic polypeptide"
EVQLVETGGGLVQPGGSLRLSCAVSGFALSNHGMSWVRRAPGKGLEWVSGIVYSGSTYYAASVKGRFTISRDNSRNTLYLQMNSLRPEDTAIYYCSAHGGESDVWGQGTTVTVSSASGGGGSGGRASGGGGSETTLTQSPATLSVSPGERATLSCRASQSVGSNLAWYQQKPGQGPRLLIYGASTRATGIPARFSGSGSGTEFTLTISSLQPEDFAVYYCQQYNDWLPVTFGQGTKVEIK

SEQ ID NO: 1479 - skipped

SEQ ID NO: 1480 - DNA, 720 bp, synthetic construct
  misc_feature 1..720: note = source = /note="Description of Artificial Sequence: Synthetic polynucleotide"
  source 1..720: mol_type = other DNA
gaagtgcaattggtggaaactggaggaggacttgtgcaacctggaggatcattgcggctctcatgcgctgtctccggcttcgccctgtcaaatcacgggatgtcgtgggtcagacgggccccgggaaagggtctggaatgggtgtcggggattgtgtacagcggctccacctactacgccgcttcggtcaagggccgcttcactatttcacgggacaacagccgcaacaccctctatctgcaaatgaactctctccgcccggaggataccgccatctactactgctccgcacacggcggcgaatccgacgtgtggggacagggaaccactgtcaccgtgtcgtccgcatccggtggcggaggatcgggtggccgggcctccgggggcggcggcagcgagactaccctgacccagtcccctgccactctgtccgtgagcccgggagagagagccacccttagctgccgggccagccagagcgtgggctccaacctggcctggtaccagcagaagccaggacagggtcccaggctgctgatctacggagcctccactcgcgcgaccggcatccccgcgaggttctccgggtcgggttccgggaccgagttcaccctgaccatctcctccctccaaccggaggacttcgcggtgtactactgtcagcagtacaacgattggctgcccgtgacatttggacaggggacgaaggtggaaatcaaa

SEQ ID NO: 1481 - protein, 115 aa, synthetic construct; identical to SEQ ID NO: 1450
  REGION 1..115: note = source = /note="Description of Artificial Sequence: Synthetic polypeptide"

SEQ ID NO: 1482 - protein, 108 aa, synthetic construct
  REGION 1..108: note = source = /note="Description of Artificial Sequence: Synthetic polypeptide"
ETTLTQSPATLSVSPGERATLSCRASQSVGSNLAWYQQKPGQGPRLLIYGASTRATGIPARFSGSGSGTEFTLTISSLQPEDFAVYYCQQYNDWLPVTFGQGTKVEIK

SEQ ID NO: 1483 - protein, 484 aa, synthetic construct
  REGION 1..484: note = source = /note="Description of Artificial Sequence: Synthetic polypeptide"
MALPVTALLLPLALLLHAARPEVQLVETGGGLVQPGGSLRLSCAVSGFALSNHGMSWVRRAPGKGLEWVSGIVYSGSTYYAASVKGRFTISRDNSRNTLYLQMNSLRPEDTAIYYCSAHGGESDVWGQGTTVTVSSASGGGGSGGRASGGGGSETTLTQSPATLSVSPGERATLSCRASQSVGSNLAWYQQKPGQGPRLLIYGASTRATGIPARFSGSGSGTEFTLTISSLQPEDFAVYYCQQYNDWLPVTFGQGTKVEIKTTTPAPRPPTPAPTIASQPLSLRPEACRPAAGGAVHTRGLDFACDIYIWAPLAGTCGVLLLSLVITLYCKRGRKKLLYIFKQPFMRPVQTTQEEDGCSCRFPEEEEGGCELRVKFSRSADAPAYKQGQNQLYNELNLGRREEYDVLDKRRGRDPEMGGKPRRKNPQEGLYNELQKDKMAEAYSEIGMKGERRRGKGHDGLYQGLSTATKDTYDALHMQALPPR

SEQ ID NO: 1484 - DNA, 1452 bp, synthetic construct
  misc_feature 1..1452: note = source = /note="Description of Artificial Sequence: Synthetic polynucleotide"
  source 1..1452: mol_type = other DNA
atggccctccctgtcaccgccctgctgcttccgctggctcttctgctccacgccgctcggcccgaagtgcaattggtggaaactggaggaggacttgtgcaacctggaggatcattgcggctctcatgcgctgtctccggcttcgccctgtcaaatcacgggatgtcgtgggtcagacgggccccgggaaagggtctggaatgggtgtcggggattgtgtacagcggctccacctactacgccgcttcggtcaagggccgcttcactatttcacgggacaacagccgcaacaccctctatctgcaaatgaactctctccgcccggaggataccgccatctactactgctccgcacacggcggcgaatccgacgtgtggggacagggaaccactgtcaccgtgtcgtccgcatccggtggcggaggatcgggtggccgggcctccgggggcggcggcagcgagactaccctgacccagtcccctgccactctgtccgtgagcccgggagagagagccacccttagctgccgggccagccagagcgtgggctccaacctggcctggtaccagcagaagccaggacagggtcccaggctgctgatctacggagcctccactcgcgcgaccggcatccccgcgaggttctccgggtcgggttccgggaccgagttcaccctgaccatctcctccctccaaccggaggacttcgcggtgtactactgtcagcagtacaacgattggctgcccgtgacatttggacaggggacgaaggtggaaatcaaaaccactaccccagcaccgaggccacccaccccggctcctaccatcgcctcccagcctctgtccctgcgtccggaggcatgtagacccgcagctggtggggccgtgcatacccggggtcttgacttcgcctgcgatatctacatttgggcccctctggctggtacttgcggggtcctgctgctttcactcgtgatcactctttactgtaagcgcggtcggaagaagctgctgtacatctttaagcaacccttcatgaggcctgtgcagactactcaagaggaggacggctgttcatgccggttcccagaggaggaggaaggcggctgcgaactgcgcgtgaaattcagccgcagcgcagatgctccagcctacaagcaggggcagaaccagctctacaacgaactcaatcttggtcggagagaggagtacgacgtgctggacaagcggagaggacgggacccagaaatgggcgggaagccgcgcagaaagaatccccaagagggcctgtacaacgagctccaaaaggataagatggcagaagcctatagcgagattggtatgaaaggggaacgcagaagaggcaaaggccacgacggactgtaccagggactcagcaccgccaccaaggacacctatgacgctcttcacatgcaggccctgccgcctcgg

SEQ ID NO: 1485 - protein, 241 aa, synthetic construct
  REGION 1..241: note = source = /note="Description of Artificial Sequence: Synthetic polypeptide"
EVQLVESGGGLVQPGGSLRLSCAVSGFALSNHGMSWVRRAPGKGLEWVSGIVYSGSTYYAASVKGRFTISRDNSRNTLYLQMNSLRPEDTAIYYCSAHGGESDVWGQGTTVTVSSASGGGGSGGRASGGGGSEIVLTQSPGTLSLSPGERATLSCRASQSIGSSSLAWYQQKPGQAPRLLMYGASSRASGIPDRFSGSGSGTDFTLTISRLEPEDFAVYYCQQYAGSPPFTFGQGTKVEIK

SEQ ID NO: 1486 - DNA, 723 bp, synthetic construct
  misc_feature 1..723: note = source = /note="Description of Artificial Sequence: Synthetic polynucleotide"
  source 1..723: mol_type = other DNA
gaagtgcaattggtggaatctggtggaggacttgtgcaacctggaggatcactgagactgtcatgcgcggtgtccggttttgccctgagcaatcatgggatgtcgtgggtccggcgcgcccccggaaagggtctggaatgggtgtcgggtatcgtctactccgggagcacttactacgccgcgagcgtgaagggccgcttcaccatttcccgcgataactcccgcaacaccctgtacttgcaaatgaactcgctccggcctgaggacactgccatctactactgctccgcacacggaggagaatccgacgtgtggggccagggaactaccgtgaccgtcagcagcgcctccggcggcgggggctcaggcggacgggctagcggcggcggtggctccgagatcgtgctgacccagtcgcctggcactctctcgctgagccccggggaaagggcaaccctgtcctgtcgggccagccagtccattggatcatcctccctcgcctggtatcagcagaaaccgggacaggctccgcggctgcttatgtatggggccagctcaagagcctccggcattcccgaccggttctccgggtccggttccggcaccgatttcaccctgactatctcgaggctggagccagaggacttcgccgtgtactactgccagcagtacgcggggtccccgccgttcacgttcggacagggaaccaaggtcgagatcaag

SEQ ID NO: 1487 - protein, 115 aa, synthetic construct; identical to SEQ ID NO: 1402
  REGION 1..115: note = source = /note="Description of Artificial Sequence: Synthetic polypeptide"

SEQ ID NO: 1488 - protein, 109 aa, synthetic construct
  REGION 1..109: note = source = /note="Description of Artificial Sequence: Synthetic polypeptide"
EIVLTQSPGTLSLSPGERATLSCRASQSIGSSSLAWYQQKPGQAPRLLMYGASSRASGIPDRFSGSGSGTDFTLTISRLEPEDFAVYYCQQYAGSPPFTFGQGTKVEIK

SEQ ID NO: 1489 - protein, 485 aa, synthetic construct
  REGION 1..485: note = source = /note="Description of Artificial Sequence: Synthetic polypeptide"
MALPVTALLLPLALLLHAARPEVQLVESGGGLVQPGGSLRLSCAVSGFALSNHGMSWVRRAPGKGLEWVSGIVYSGSTYYAASVKGRFTISRDNSRNTLYLQMNSLRPEDTAIYYCSAHGGESDVWGQGTTVTVSSASGGGGSGGRASGGGGSEIVLTQSPGTLSLSPGERATLSCRASQSIGSSSLAWYQQKPGQAPRLLMYGASSRASGIPDRFSGSGSGTDFTLTISRLEPEDFAVYYCQQYAGSPPFTFGQGTKVEIKTTTPAPRPPTPAPTIASQPLSLRPEACRPAAGGAVHTRGLDFACDIYIWAPLAGTCGVLLLSLVITLYCKRGRKKLLYIFKQPFMRPVQTTQEEDGCSCRFPEEEEGGCELRVKFSRSADAPAYKQGQNQLYNELNLGRREEYDVLDKRRGRDPEMGGKPRRKNPQEGLYNELQKDKMAEAYSEIGMKGERRRGKGHDGLYQGLSTATKDTYDALHMQALPPR

SEQ ID NO: 1490 - DNA, 1455 bp, synthetic construct
  misc_feature 1..1455: note = source = /note="Description of Artificial Sequence: Synthetic polynucleotide"
  source 1..1455: mol_type = other DNA
atggccctccctgtcaccgccctgctgcttccgctggctcttctgctccacgccgctcggcccgaagtgcaattggtggaatctggtggaggacttgtgcaacctggaggatcactgagactgtcatgcgcggtgtccggttttgccctgagcaatcatgggatgtcgtgggtccggcgcgcccccggaaagggtctggaatgggtgtcgggtatcgtctactccgggagcacttactacgccgcgagcgtgaagggccgcttcaccatttcccgcgataactcccgcaacaccctgtacttgcaaatgaactcgctccggcctgaggacactgccatctactactgctccgcacacggaggagaatccgacgtgtggggccagggaactaccgtgaccgtcagcagcgcctccggcggcgggggctcaggcggacgggctagcggcggcggtggctccgagatcgtgctgacccagtcgcctggcactctctcgctgagccccggggaaagggcaaccctgtcctgtcgggccagccagtccattggatcatcctccctcgcctggtatcagcagaaaccgggacaggctccgcggctgcttatgtatggggccagctcaagagcctccggcattcccgaccggttctccgggtccggttccggcaccgatttcaccctgactatctcgaggctggagccagaggacttcgccgtgtactactgccagcagtacgcggggtccccgccgttcacgttcggacagggaaccaaggtcgagatcaagaccactaccccagcaccgaggccacccaccccggctcctaccatcgcctcccagcctctgtccctgcgtccggaggcatgtagacccgcagctggtggggccgtgcatacccggggtcttgacttcgcctgcgatatctacatttgggcccctctggctggtacttgcggggtcctgctgctttcactcgtgatcactctttactgtaagcgcggtcggaagaagctgctgtacatctttaagcaacccttcatgaggcctgtgcagactactcaagaggaggacggctgttcatgccggttcccagaggaggaggaaggcggctgcgaactgcgcgtgaaattcagccgcagcgcagatgctccagcctacaagcaggggcagaaccagctctacaacgaactcaatcttggtcggagagaggagtacgacgtgctggacaagcggagaggacgggacccagaaatgggcgggaagccgcgcagaaagaatccccaagagggcctgtacaacgagctccaaaaggataagatggcagaagcctatagcgagattggtatgaaaggggaacgcagaagaggcaaaggccacgacggactgtaccagggactcagcaccgccaccaaggacacctatgacgctcttcacatgcaggccctgccgcctcgg

SEQ ID NO: 1491 - protein, 243 aa, synthetic construct
  REGION 1..243: note = source = /note="Description of Artificial Sequence: Synthetic polypeptide"
QVQLQESGPGLVKPSETLSLTCTVSGGSISSSYYYWGWIRQPPGKGLEWIGSIYYSGSAYYNPSLKSRVTISVDTSKNQFSLRLSSVTAADTAVYYCARHWQEWPDAFDIWGQGTMVTVSSGGGGSGGGGSGGGGSETTLTQSPAFMSATPGDKVIISCKASQDIDDAMNWYQQKPGEAPLFIIQSATSPVPGIPPRFSGSGFGTDFSLTINNIESEDAAYYFCLQHDNFPLTFGQGTKLEIK

SEQ ID NO: 1492 - DNA, 729 bp, synthetic construct
  misc_feature 1..729: note = source = /note="Description of Artificial Sequence: Synthetic polynucleotide"
  source 1..729: mol_type = other DNA
caagtgcagcttcaggaaagcggaccgggcctggtcaagccatccgaaactctctccctgacttgcactgtgtctggcggttccatctcatcgtcgtactactactggggctggattaggcagccgcccggaaagggactggagtggatcggaagcatctactattccggctcggcgtactacaaccctagcctcaagtcgagagtgaccatctccgtggatacctccaagaaccagttttccctgcgcctgagctccgtgaccgccgctgacaccgccgtgtactactgtgctcggcattggcaggaatggcccgatgccttcgacatttggggccagggcactatggtcactgtgtcatccgggggtggaggcagcgggggaggagggtccggggggggaggttcagagacaaccttgacccagtcacccgcattcatgtccgccactccgggagacaaggtcatcatctcgtgcaaagcgtcccaggatatcgacgatgccatgaattggtaccagcagaagcctggcgaagcgccgctgttcattatccaatccgcaacctcgcccgtgcctggaatcccaccgcggttcagcggcagcggtttcggaaccgacttttccctgaccattaacaacattgagtccgaggacgccgcctactacttctgcctgcaacacgacaacttccctctcacgttcggccagggaaccaagctggaaatcaag

SEQ ID NO: 1493 - protein, 121 aa, synthetic construct
  REGION 1..121: note = source = /note="Description of Artificial Sequence: Synthetic polypeptide"
QVQLQESGPGLVKPSETLSLTCTVSGGSISSSYYYWGWIRQPPGKGLEWIGSIYYSGSAYYNPSLKSRVTISVDTSKNQFSLRLSSVTAADTAVYYCARHWQEWPDAFDIWGQGTMVTVSS

SEQ ID NO: 1494 - protein, 107 aa, synthetic construct
  REGION 1..107: note = source = /note="Description of Artificial Sequence: Synthetic polypeptide"
ETTLTQSPAFMSATPGDKVIISCKASQDIDDAMNWYQQKPGEAPLFIIQSATSPVPGIPPRFSGSGFGTDFSLTINNIESEDAAYYFCLQHDNFPLTFGQGTKLEIK

SEQ ID NO: 1495 - protein, 487 aa, synthetic construct
  REGION 1..487: note = source = /note="Description of Artificial Sequence: Synthetic polypeptide"
MALPVTALLLPLALLLHAARPQVQLQESGPGLVKPSETLSLTCTVSGGSISSSYYYWGWIRQPPGKGLEWIGSIYYSGSAYYNPSLKSRVTISVDTSKNQFSLRLSSVTAADTAVYYCARHWQEWPDAFDIWGQGTMVTVSSGGGGSGGGGSGGGGSETTLTQSPAFMSATPGDKVIISCKASQDIDDAMNWYQQKPGEAPLFIIQSATSPVPGIPPRFSGSGFGTDFSLTINNIESEDAAYYFCLQHDNFPLTFGQGTKLEIKTTTPAPRPPTPAPTIASQPLSLRPEACRPAAGGAVHTRGLDFACDIYIWAPLAGTCGVLLLSLVITLYCKRGRKKLLYIFKQPFMRPVQTTQEEDGCSCRFPEEEEGGCELRVKFSRSADAPAYKQGQNQLYNELNLGRREEYDVLDKRRGRDPEMGGKPRRKNPQEGLYNELQKDKMAEAYSEIGMKGERRRGKGHDGLYQGLSTATKDTYDALHMQALPPR

SEQ ID NO: 1496 - DNA, 1461 bp, synthetic construct
  misc_feature 1..1461: note = source = /note="Description of Artificial Sequence: Synthetic polynucleotide"
  source 1..1461: mol_type = other DNA
atggccctccctgtcaccgccctgctgcttccgctggctcttctgctccacgccgctcggccccaagtgcagcttcaggaaagcggaccgggcctggtcaagccatccgaaactctctccctgacttgcactgtgtctggcggttccatctcatcgtcgtactactactggggctggattaggcagccgcccggaaagggactggagtggatcggaagcatctactattccggctcggcgtactacaaccctagcctcaagtcgagagtgaccatctccgtggatacctccaagaaccagttttccctgcgcctgagctccgtgaccgccgctgacaccgccgtgtactactgtgctcggcattggcaggaatggcccgatgccttcgacatttggggccagggcactatggtcactgtgtcatccgggggtggaggcagcgggggaggagggtccggggggggaggttcagagacaaccttgacccagtcacccgcattcatgtccgccactccgggagacaaggtcatcatctcgtgcaaagcgtcccaggatatcgacgatgccatgaattggtaccagcagaagcctggcgaagcgccgctgttcattatccaatccgcaacctcgcccgtgcctggaatcccaccgcggttcagcggcagcggtttcggaaccgacttttccctgaccattaacaacattgagtccgaggacgccgcctactacttctgcctgcaacacgacaacttccctctcacgttcggccagggaaccaagctggaaatcaagaccactaccccagcaccgaggccacccaccccggctcctaccatcgcctcccagcctctgtccctgcgtccggaggcatgtagacccgcagctggtggggccgtgcatacccggggtcttgacttcgcctgcgatatctacatttgggcccctctggctggtacttgcggggtcctgctgctttcactcgtgatcactctttactgtaagcgcggtcggaagaagctgctgtacatctttaagcaacccttcatgaggcctgtgcagactactcaagaggaggacggctgttcatgccggttcccagaggaggaggaaggcggctgcgaactgcgcgtgaaattcagccgcagcgcagatgctccagcctacaagcaggggcagaaccagctctacaacgaactcaatcttggtcggagagaggagtacgacgtgctggacaagcggagaggacgggacccagaaatgggcgggaagccgcgcagaaagaatccccaagagggcctgtacaacgagctccaaaaggataagatggcagaagcctatagcgagattggtatgaaaggggaacgcagaagaggcaaaggccacgacggactgtaccagggactcagcaccgccaccaaggacacctatgacgctcttcacatgcaggccctgccgcctcgg

SEQ ID NO: 1497 - protein, 244 aa, synthetic construct
  REGION 1..244: note = source = /note="Description of Artificial Sequence: Synthetic polypeptide"
VNLRESGPALVKPTQTLTLTCTFSGFSLRTSGMCVSWIRQPPGKALEWLARIDWDEDKFYSTSLKTRLTISKDTSDNQVVLRMTNMDPADTATYYCARSGAGGTSATAFDIWGPGTMVTVSSGGGGSGGGGSGGGGSDIQMTQSPSSLSASVGDRVTITCRASQDIYNNLAWFQLKPGSAPRSLMYAANKSQSGVPSRFSGSASGTDFTLTISSLQPEDFATYYCQHYYRFPYSFGQGTKLEIK

SEQ ID NO: 1498 - DNA, 735 bp, synthetic construct
  misc_feature 1..735: note = source = /note="Description of Artificial Sequence: Synthetic polynucleotide"
  source 1..735: mol_type = other DNA
caagtcaatctgcgcgaatccggccccgccttggtcaagcctacccagaccctcactctgacctgtactttctccggcttctccctgcggacttccgggatgtgcgtgtcctggatcagacagcctccgggaaaggccctggagtggctcgctcgcattgactgggatgaggacaagttctactccacctcactcaagaccaggctgaccatcagcaaagatacctctgacaaccaagtggtgctccgcatgaccaacatggacccagccgacactgccacttactactgcgcgaggagcggagcgggcggaacctccgccaccgccttcgatatttggggcccgggtaccatggtcaccgtgtcaagcggaggaggggggtccgggggcggcggttccgggggaggcggatcggacattcagatgactcagtcaccatcgtccctgagcgctagcgtgggcgacagagtgacaatcacttgccgggcatcccaggacatctataacaaccttgcgtggttccagctgaagcctggttccgcaccgcggtcacttatgtacgccgccaacaagagccagtcgggagtgccgtcccggttttccggttcggcctcgggaactgacttcaccctgacgatctccagcctgcaacccgaggatttcgccacctactactgccagcactactaccgctttccctactcgttcggacagggaaccaagctggaaatcaag

SEQ ID NO: 1499 - protein, 123 aa, synthetic construct
  REGION 1..123: note = source = /note="Description of Artificial Sequence: Synthetic polypeptide"
QVNLRESGPALVKPTQTLTLTCTFSGFSLRTSGMCVSWIRQPPGKALEWLARIDWDEDKFYSTSLKTRLTISKDTSDNQVVLRMTNMDPADTATYYCARSGAGGTSATAFDIWGPGTMVTVSS

SEQ ID NO: 1500 - protein, 107 aa, synthetic construct
  REGION 1..107: note = source = /note="Description of Artificial Sequence: Synthetic polypeptide"
DIQMTQSPSSLSASVGDRVTITCRASQDIYNNLAWFQLKPGSAPRSLMYAANKSQSGVPSRFSGSASGTDFTLTISSLQPEDFATYYCQHYYRFPYSFGQGTKLEIK

SEQ ID NO: 1501 - protein, 489 aa, synthetic construct
  REGION 1..489: note = source = /note="Description of Artificial Sequence: Synthetic polypeptide"
MALPVTALLLPLALLLHAARPQVNLRESGPALVKPTQTLTLTCTFSGFSLRTSGMCVSWIRQPPGKALEWLARIDWDEDKFYSTSLKTRLTISKDTSDNQVVLRMTNMDPADTATYYCARSGAGGTSATAFDIWGPGTMVTVSSGGGGSGGGGSGGGGSDIQMTQSPSSLSASVGDRVTITCRASQDIYNNLAWFQLKPGSAPRSLMYAANKSQSGVPSRFSGSASGTDFTLTISSLQPEDFATYYCQHYYRFPYSFGQGTKLEIKTTTPAPRPPTPAPTIASQPLSLRPEACRPAAGGAVHTRGLDFACDIYIWAPLAGTCGVLLLSLVITLYCKRGRKKLLYIFKQPFMRPVQTTQEEDGCSCRFPEEEEGGCELRVKFSRSADAPAYKQGQNQLYNELNLGRREEYDVLDKRRGRDPEMGGKPRRKNPQEGLYNELQKDKMAEAYSEIGMKGERRRGKGHDGLYQGLSTATKDTYDALHMQALPPR

SEQ ID NO: 1502 - DNA, 1467 bp, synthetic construct
  misc_feature 1..1467: note = source = /note="Description of Artificial Sequence: Synthetic polynucleotide"
  source 1..1467: mol_type = other DNA
atggccctccctgtcaccgccctgctgcttccgctggctcttctgctccacgccgctcggccccaagtcaatctgcgcgaatccggccccgccttggtcaagcctacccagaccctcactctgacctgtactttctccggcttctccctgcggacttccgggatgtgcgtgtcctggatcagacagcctccgggaaaggccctggagtggctcgctcgcattgactgggatgaggacaagttctactccacctcactcaagaccaggctgaccatcagcaaagatacctctgacaaccaagtggtgctccgcatgaccaacatggacccagccgacactgccacttactactgcgcgaggagcggagcgggcggaacctccgccaccgccttcgatatttggggcccgggtaccatggtcaccgtgtcaagcggaggaggggggtccgggggcggcggttccgggggaggcggatcggacattcagatgactcagtcaccatcgtccctgagcgctagcgtgggcgacagagtgacaatcacttgccgggcatcccaggacatctataacaaccttgcgtggttccagctgaagcctggttccgcaccgcggtcacttatgtacgccgccaacaagagccagtcgggagtgccgtcccggttttccggttcggcctcgggaactgacttcaccctgacgatctccagcctgcaacccgaggatttcgccacctactactgccagcactactaccgctttccctactcgttcggacagggaaccaagctggaaatcaagaccactaccccagcaccgaggccacccaccccggctcctaccatcgcctcccagcctctgtccctgcgtccggaggcatgtagacccgcagctggtggggccgtgcatacccggggtcttgacttcgcctgcgatatctacatttgggcccctctggctggtacttgcggggtcctgctgctttcactcgtgatcactctttactgtaagcgcggtcggaagaagctgctgtacatctttaagcaacccttcatgaggcctgtgcagactactcaagaggaggacggctgttcatgccggttcccagaggaggaggaaggcggctgcgaactgcgcgtgaaattcagccgcagcgcagatgctccagcctacaagcaggggcagaaccagctctacaacgaactcaatcttggtcggagagaggagtacgacgtgctggacaagcggagaggacgggacccagaaatgggcgggaagccgcgcagaaagaatccccaagagggcctgtacaacgagctccaaaaggataagatggcagaagcctatagcgagattggtatgaaaggggaacgcagaagaggcaaaggccacgacggactgtaccagggactcagcaccgccaccaaggacacctatgacgctcttcacatgcaggccctgccgcctcgg

SEQ ID NO: 1503 - protein, 246 aa, synthetic construct
  REGION 1..246: note = source = /note="Description of Artificial Sequence: Synthetic polypeptide"
EVQLVESGGGLVKPGGSLRLSCAASGFTFSSYSMNWVRQAPGKGLEWVSSISSSSSYIYYADSVKGRFTISRDNAKNSLYLQMNSLRAEDTAVYYCAKTIAAVYAFDIWGQGTTVTVSSGGGGSGGGGSGGGGSEIVLTQSPLSLPVTPEEPASISCRSSQSLLHSNGYNYLDWYLQKPGQSPQLLIYLGSNRASGVPDRFSGSGSGTDFTLKISRVEAEDVGVYYCMQALQTPYTFGQGTKLEIK

SEQ ID NO: 1504 - DNA, 738 bp, synthetic construct
  misc_feature 1..738: note = source = /note="Description of Artificial Sequence: Synthetic polynucleotide"
  source 1..738: mol_type = other DNA
gaagtgcagcttgtcgaatccggggggggactggtcaagccgggcggatcactgagactgtcctgcgccgcgagcggcttcacgttctcctcctactccatgaactgggtccgccaagcccccgggaagggactggaatgggtgtcctctatctcctcgtcgtcgtcctacatctactacgccgactccgtgaagggaagattcaccatttcccgcgacaacgcaaagaactcactgtacttgcaaatgaactcactccgggccgaagatactgctgtgtactattgcgccaagactattgccgccgtctacgctttcgacatctggggccagggaaccaccgtgactgtgtcgtccggtggtggtggctcgggcggaggaggaagcggcggcggggggtccgagattgtgctgacccagtcgccactgagcctccctgtgacccccgaggaacccgccagcatcagctgccggtccagccagtccctgctccactccaacggatacaattacctcgattggtaccttcagaagcctggacaaagcccgcagctgctcatctacttgggatcaaaccgcgcgtcaggagtgcctgaccggttctccggctcgggcagcggtaccgatttcaccctgaaaatctccagggtggaggcagaggacgtgggagtgtattactgtatgcaggcgctgcagactccgtacacatttgggcagggcaccaagctggagatcaag

SEQ ID NO: 1505 - protein, 119 aa, synthetic construct
  REGION 1..119: note = source = /note="Description of Artificial Sequence: Synthetic polypeptide"
EVQLVESGGGLVKPGGSLRLSCAASGFTFSSYSMNWVRQAPGKGLEWVSSISSSSSYIYYADSVKGRFTISRDNAKNSLYLQMNSLRAEDTAVYYCAKTIAAVYAFDIWGQGTTVTVSS

SEQ ID NO: 1506 - protein, 112 aa, synthetic construct
  REGION 1..112: note = source = /note="Description of Artificial Sequence: Synthetic polypeptide"
EIVLTQSPLSLPVTPEEPASISCRSSQSLLHSNGYNYLDWYLQKPGQSPQLLIYLGSNRASGVPDRFSGSGSGTDFTLKISRVEAEDVGVYYCMQALQTPYTFGQGTKLEIK

SEQ ID NO: 1507 - protein, 490 aa, synthetic construct
  REGION 1..490: note = source = /note="Description of Artificial Sequence: Synthetic polypeptide"
MALPVTALLLPLALLLHAARPEVQLVESGGGLVKPGGSLRLSCAASGFTFSSYSMNWVRQAPGKGLEWVSSISSSSSYIYYADSVKGRFTISRDNAKNSLYLQMNSLRAEDTAVYYCAKTIAAVYAFDIWGQGTTVTVSSGGGGSGGGGSGGGGSEIVLTQSPLSLPVTPEEPASISCRSSQSLLHSNGYNYLDWYLQKPGQSPQLLIYLGSNRASGVPDRFSGSGSGTDFTLKISRVEAEDVGVYYCMQALQTPYTFGQGTKLEIKTTTPAPRPPTPAPTIASQPLSLRPEACRPAAGGAVHTRGLDFACDIYIWAPLAGTCGVLLLSLVITLYCKRGRKKLLYIFKQPFMRPVQTTQEEDGCSCRFPEEEEGGCELRVKFSRSADAPAYKQGQNQLYNELNLGRREEYDVLDKRRGRDPEMGGKPRRKNPQEGLYNELQKDKMAEAYSEIGMKGERRRGKGHDGLYQGLSTATKDTYDALHMQALPPR

SEQ ID NO: 1508 - DNA, 1470 bp, synthetic construct
  misc_feature 1..1470: note = source = /note="Description of Artificial Sequence: Synthetic polynucleotide"
  source 1..1470: mol_type = other DNA
atggccctccctgtcaccgccctgctgcttccgctggctcttctgctccacgccgctcggcccgaagtgcagcttgtcgaatccggggggggactggtcaagccgggcggatcactgagactgtcctgcgccgcgagcggcttcacgttctcctcctactccatgaactgggtccgccaagcccccgggaagggactggaatgggtgtcctctatctcctcgtcgtcgtcctacatctactacgccgactccgtgaagggaagattcaccatttcccgcgacaacgcaaagaactcactgtacttgcaaatgaactcactccgggccgaagatactgctgtgtactattgcgccaagactattgccgccgtctacgctttcgacatctggggccagggaaccaccgtgactgtgtcgtccggtggtggtggctcgggcggaggaggaagcggcggcggggggtccgagattgtgctgacccagtcgccactgagcctccctgtgacccccgaggaacccgccagcatcagctgccggtccagccagtccctgctccactccaacggatacaattacctcgattggtaccttcagaagcctggacaaagcccgcagctgctcatctacttgggatcaaaccgcgcgtcaggagtgcctgaccggttctccggctcgggcagcggtaccgatttcaccctgaaaatctccagggtggaggcagaggacgtgggagtgtattactgtatgcaggcgctgcagactccgtacacatttgggcagggcaccaagctggagatcaagaccactaccccagcaccgaggccacccaccccggctcctaccatcgcctcccagcctctgtccctgcgtccggaggcatgtagacccgcagctggtggggccgtgcatacccggggtcttgacttcgcctgcgatatctacatttgggcccctctggctggtacttgcggggtcctgctgctttcactcgtgatcactctttactgtaagcgcggtcggaagaagctgctgtacatctttaagcaacccttcatgaggcctgtgcagactactcaagaggaggacggctgttcatgccggttcccagaggaggaggaaggcggctgcgaactgcgcgtgaaattcagccgcagcgcagatgctccagcctacaagcaggggcagaaccagctctacaacgaactcaatcttggtcggagagaggagtacgacgtgctggacaagcggagaggacgggacccagaaatgggcgggaagccgcgcagaaagaatccccaagagggcctgtacaacgagctccaaaaggataagatggcagaagcctatagcgagattggtatgaaaggggaacgcagaagaggcaaaggccacgacggactgtaccagggactcagcaccgccaccaaggacacctatgacgctcttcacatgcaggccctgccgcctcgg

SEQ ID NO: 1509 - protein, 240 aa, synthetic construct
  REGION 1..240: note = source = /note="Description of Artificial Sequence: Synthetic polypeptide"
EVQLVESGGGLVKPGGSLRLSCAASGFTFSDYYMSWIRQAPGKGLEWVSYISSSGSTIYYADSVKGRFTISRDNAKNSLYLQMNSLRAEDTAVYYCARDLRGAFDIWGQGTMVTVSSGGGGSGGGGSGGGGSSYVLTQSPSVSAAPGYTATISCGGNNIGTKSVHWYQQKPGQAPLLVIRDDSVRPSKIPGRFSGSNSGNMATLTISGVQAGDEADFYCQVWDSDSEHVVFGGGTKLTVL

SEQ ID NO: 1510 - DNA, 720 bp, synthetic construct
  misc_feature 1..720: note = source = /note="Description of Artificial Sequence: Synthetic polynucleotide"
  source 1..720: mol_type = other DNA
gaagtccagctcgtggagtccggcggaggccttgtgaagcctggaggttcgctgagactgtcctgcgccgcctccggcttcaccttctccgactactacatgtcctggatcagacaggccccgggaaagggcctggaatgggtgtcctacatctcgtcatcgggcagcactatctactacgcggactcagtgaaggggcggttcaccatttcccgggataacgcgaagaactcgctgtatctgcaaatgaactcactgagggccgaggacaccgccgtgtactactgcgcccgcgatctccgcggggcatttgacatctggggacagggaaccatggtcacagtgtccagcggagggggaggatcgggtggcggaggttccgggggtggaggctcctcctacgtgctgactcagagcccaagcgtcagcgctgcgcccggttacacggcaaccatctcctgtggcggaaacaacattgggaccaagtctgtgcactggtatcagcagaagccgggccaagctcccctgttggtgatccgcgatgactccgtgcggcctagcaaaattccgggacggttctccggctccaacagcggcaatatggccactctcaccatctcgggagtgcaggccggagatgaagccgacttctactgccaagtctgggactcagactccgagcatgtggtgttcgggggcggaaccaagctgactgtgctc

SEQ ID NO: 1511 - protein, 117 aa, synthetic construct
  REGION 1..117: note = source = /note="Description of Artificial Sequence: Synthetic polypeptide"
EVQLVESGGGLVKPGGSLRLSCAASGFTFSDYYMSWIRQAPGKGLEWVSYISSSGSTIYYADSVKGRFTISRDNAKNSLYLQMNSLRAEDTAVYYCARDLRGAFDIWGQGTMVTVSS

SEQ ID NO: 1512 - protein, 108 aa, synthetic construct
  REGION 1..108: note = source = /note="Description of Artificial Sequence: Synthetic polypeptide"
SYVLTQSPSVSAAPGYTATISCGGNNIGTKSVHWYQQKPGQAPLLVIRDDSVRPSKIPGRFSGSNSGNMATLTISGVQAGDEADFYCQVWDSDSEHVVFGGGTKLTVL

SEQ ID NO: 1513 - protein, 484 aa, synthetic construct
  REGION 1..484: note = source = /note="Description of Artificial Sequence: Synthetic polypeptide"
MALPVTALLLPLALLLHAARPEVQLVESGGGLVKPGGSLRLSCAASGFTFSDYYMSWIRQAPGKGLEWVSYISSSGSTIYYADSVKGRFTISRDNAKNSLYLQMNSLRAEDTAVYYCARDLRGAFDIWGQGTMVTVSSGGGGSGGGGSGGGGSSYVLTQSPSVSAAPGYTATISCGGNNIGTKSVHWYQQKPGQAPLLVIRDDSVRPSKIPGRFSGSNSGNMATLTISGVQAGDEADFYCQVWDSDSEHVVFGGGTKLTVLTTTPAPRPPTPAPTIASQPLSLRPEACRPAAGGAVHTRGLDFACDIYIWAPLAGTCGVLLLSLVITLYCKRGRKKLLYIFKQPFMRPVQTTQEEDGCSCRFPEEEEGGCELRVKFSRSADAPAYKQGQNQLYNELNLGRREEYDVLDKRRGRDPEMGGKPRRKNPQEGLYNELQKDKMAEAYSEIGMKGERRRGKGHDGLYQGLSTATKDTYDALHMQALPPR

SEQ ID NO: 1514 - DNA, 1452 bp, synthetic construct
  misc_feature 1..1452: note = source = /note="Description of Artificial Sequence: Synthetic polynucleotide"
  source 1..1452: mol_type = other DNA
atggccctccctgtcaccgccctgctgcttccgctggctcttctgctccacgccgctcggcccgaagtccagctcgtggagtccggcggaggccttgtgaagcctggaggttcgctgagactgtcctgcgccgcctccggcttcaccttctccgactactacatgtcctggatcagacaggccccgggaaagggcctggaatgggtgtcctacatctcgtcatcgggcagcactatctactacgcggactcagtgaaggggcggttcaccatttcccgggataacgcgaagaactcgctgtatctgcaaatgaactcactgagggccgaggacaccgccgtgtactactgcgcccgcgatctccgcggggcatttgacatctggggacagggaaccatggtcacagtgtccagcggagggggaggatcgggtggcggaggttccgggggtggaggctcctcctacgtgctgactcagagcccaagcgtcagcgctgcgcccggttacacggcaaccatctcctgtggcggaaacaacattgggaccaagtctgtgcactggtatcagcagaagccgggccaagctcccctgttggtgatccgcgatgactccgtgcggcctagcaaaattccgggacggttctccggctccaacagcggcaatatggccactctcaccatctcgggagtgcaggccggagatgaagccgacttctactgccaagtctgggactcagactccgagcatgtggtgttcgggggcggaaccaagctgactgtgctcaccactaccccagcaccgaggccacccaccccggctcctaccatcgcctcccagcctctgtccctgcgtccggaggcatgtagacccgcagctggtggggccgtgcatacccggggtcttgacttcgcctgcgatatctacatttgggcccctctggctggtacttgcggggtcctgctgctttcactcgtgatcactctttactgtaagcgcggtcggaagaagctgctgtacatctttaagcaacccttcatgaggcctgtgcagactactcaagaggaggacggctgttcatgccggttcccagaggaggaggaaggcggctgcgaactgcgcgtgaaattcagccgcagcgcagatgctccagcctacaagcaggggcagaaccagctctacaacgaactcaatcttggtcggagagaggagtacgacgtgctggacaagcggagaggacgggacccagaaatgggcgggaagccgcgcagaaagaatccccaagagggcctgtacaacgagctccaaaaggataagatggcagaagcctatagcgagattggtatgaaaggggaacgcagaagaggcaaaggccacgacggactgtaccagggactcagcaccgccaccaaggacacctatgacgctcttcacatgcaggccctgccgcctcgg

SEQ ID NO: 1515 - protein, 241 aa, synthetic construct
  REGION 1..241: note = source = /note="Description of Artificial Sequence: Synthetic polypeptide"
QVQLVQSGAEVKKPGASVKVSCKPSGYTVTSHYIHWVRRAPGQGLEWMGMINPSGGVTAYSQTLQGRVTMTSDTSSSTVYMELSSLRSEDTAMYYCAREGSGSGWYFDFWGRGTLVTVSSGGGGSGGGGSGGGGSSYVLTQPPSVSVSPGQTASITCSGDGLSKKYVSWYQQKAGQSPVVLISRDKERPSGIPDRFSGSNSADTATLTISGTQAMDEADYYCQAWDDTTVVFGGGTKLTVL

SEQ ID NO: 1516 - DNA, 723 bp, synthetic construct
  misc_feature 1..723: note = source = /note="Description of Artificial Sequence: Synthetic polynucleotide"
  source 1..723: mol_type = other DNA
caagtgcagctggtgcagagcggggccgaagtcaagaagccgggagcctccgtgaaagtgtcctgcaagccttcgggatacaccgtgacctcccactacattcattgggtccgccgcgcccccggccaaggactcgagtggatgggcatgatcaaccctagcggcggagtgaccgcgtacagccagacgctgcagggacgcgtgactatgacctcggatacctcctcctccaccgtctatatggaactgtccagcctgcggtccgaggataccgccatgtactactgcgcccgggaaggatcaggctccgggtggtatttcgacttctggggaagaggcaccctcgtgactgtgtcatctgggggagggggttccggtggtggcggatcgggaggaggcggttcatcctacgtgctgacccagccaccctccgtgtccgtgagccccggccagactgcatcgattacatgtagcggcgacggcctctccaagaaatacgtgtcgtggtaccagcagaaggccggacagagcccggtggtgctgatctcaagagataaggagcggcctagcggaatcccggacaggttctcgggttccaactccgcggacactgctactctgaccatctcggggacccaggctatggacgaagccgattactactgccaagcctgggacgacactactgtcgtgtttggagggggcaccaagttgaccgtcctt

SEQ ID NO: 1517 - protein, 120 aa, synthetic construct
  REGION 1..120: note = source = /note="Description of Artificial Sequence: Synthetic polypeptide"
QVQLVQSGAEVKKPGASVKVSCKPSGYTVTSHYIHWVRRAPGQGLEWMGMINPSGGVTAYSQTLQGRVTMTSDTSSSTVYMELSSLRSEDTAMYYCAREGSGSGWYFDFWGRGTLVTVSS

SEQ ID NO: 1518 - protein, 106 aa, synthetic construct
  REGION 1..106: note = source = /note="Description of Artificial Sequence: Synthetic polypeptide"
SYVLTQPPSVSVSPGQTASITCSGDGLSKKYVSWYQQKAGQSPVVLISRDKERPSGIPDRFSGSNSADTATLTISGTQAMDEADYYCQAWDDTTVVFGGGTKLTVL

SEQ ID NO: 1519 - protein, 485 aa, synthetic construct
  REGION 1..485: note = source = /note="Description of Artificial Sequence: Synthetic polypeptide"
MALPVTALLLPLALLLHAARPQVQLVQSGAEVKKPGASVKVSCKPSGYTVTSHYIHWVRRAPGQGLEWMGMINPSGGVTAYSQTLQGRVTMTSDTSSSTVYMELSSLRSEDTAMYYCAREGSGSGWYFDFWGRGTLVTVSSGGGGSGGGGSGGGGSSYVLTQPPSVSVSPGQTASITCSGDGLSKKYVSWYQQKAGQSPVVLISRDKERPSGIPDRFSGSNSADTATLTISGTQAMDEADYYCQAWDDTTVVFGGGTKLTVLTTTPAPRPPTPAPTIASQPLSLRPEACRPAAGGAVHTRGLDFACDIYIWAPLAGTCGVLLLSLVITLYCKRGRKKLLYIFKQPFMRPVQTTQEEDGCSCRFPEEEEGGCELRVKFSRSADAPAYKQGQNQLYNELNLGRREEYDVLDKRRGRDPEMGGKPRRKNPQEGLYNELQKDKMAEAYSEIGMKGERRRGKGHDGLYQGLSTATKDTYDALHMQALPPR

SEQ ID NO: 1520 - DNA, 1455 bp, synthetic construct
  misc_feature 1..1455: note = source = /note="Description of Artificial Sequence: Synthetic polynucleotide"
  source 1..1455: mol_type = other DNA
atggccctccctgtcaccgccctgctgcttccgctggctcttctgctccacgccgctcggccccaagtgcagctggtgcagagcggggccgaagtcaagaagccgggagcctccgtgaaagtgtcctgcaagccttcgggatacaccgtgacctcccactacattcattgggtccgccgcgcccccggccaaggactcgagtggatgggcatgatcaaccctagcggcggagtgaccgcgtacagccagacgctgcagggacgcgtgactatgacctcggatacctcctcctccaccgtctatatggaactgtccagcctgcggtccgaggataccgccatgtactactgcgcccgggaaggatcaggctccgggtggtatttcgacttctggggaagaggcaccctcgtgactgtgtcatctgggggagggggttccggtggtggcggatcgggaggaggcggttcatcctacgtgctgacccagccaccctccgtgtccgtgagccccggccagactgcatcgattacatgtagcggcgacggcctctccaagaaatacgtgtcgtggtaccagcagaaggccggacagagcccggtggtgctgatctcaagagataaggagcggcctagcggaatcccggacaggttctcgggttccaactccgcggacactgctactctgaccatctcggggacccaggctatggacgaagccgattactactgccaagcctgggacgacactactgtcgtgtttggagggggcaccaagttgaccgtccttaccactaccccagcaccgaggccacccaccccggctcctaccatcgcctcccagcctctgtccctgcgtccggaggcatgtagacccgcagctggtggggccgtgcatacccggggtcttgacttcgcctgcgatatctacatttgggcccctctggctggtacttgcggggtcctgctgctttcactcgtgatcactctttactgtaagcgcggtcggaagaagctgctgtacatctttaagcaacccttcatgaggcctgtgcagactactcaagaggaggacggctgttcatgccggttcccagaggaggaggaaggcggctgcgaactgcgcgtgaaattcagccgcagcgcagatgctccagcctacaagcaggggcagaaccagctctacaacgaactcaatcttggtcggagagaggagtacgacgtgctggacaagcggagaggacgggacccagaaatgggcgggaagccgcgcagaaagaatccccaagagggcctgtacaacgagctccaaaaggataagatggcagaagcctatagcgagattggtatgaaaggggaacgcagaagaggcaaaggccacgacggactgtaccagggactcagcaccgccaccaaggacacctatgacgctcttcacatgcaggccctgccgcctcgg

SEQ ID NO: 1521 - protein, 245 aa, synthetic construct
  REGION 1..245: note = source = /note="Description of Artificial Sequence: Synthetic polypeptide"
QVQLQESGPGLVKPSQTLSLTCTVSGGSISSGGYYWSWIRQHPGKGLEWIGYIYYSGSTYYNPSLKSRVTISVDTSKNQFSLKLSSVTAADTAVYYCARAGIAARLRGAFDIWGQGTMVTVSSGGGGSGGGGSGGGGSDIVMTQSPSSVSASVGDRVIITCRASQGIRNWLAWYQQKPGKAPNLLIYAASNLQSGVPSRFSGSGSGADFTLTISSLQPEDVATYYCQKYNSAPFTFGPGTKVDIK

SEQ ID NO: 1522 - DNA, 735 bp, synthetic construct
  misc_feature 1..735: note = source = /note="Description of Artificial Sequence: Synthetic polynucleotide"
  source 1..735: mol_type = other DNA
caagtgcagcttcaggagagcggcccgggactcgtgaagccgtcccagaccctgtccctgacttgcaccgtgtcgggaggaagcatctcgagcggaggctactattggtcgtggattcggcagcaccctggaaagggcctggaatggatcggctacatctactactccggctcgacctactacaacccatcgctgaagtccagagtgacaatctcagtggacacgtccaagaatcagttcagcctgaagctctcttccgtgactgcggccgacaccgccgtgtactactgcgcacgcgctggaattgccgcccggctgaggggtgccttcgacatttggggacagggcaccatggtcaccgtgtcctccggcggcggaggttccgggggtggaggctcaggaggaggggggtccgacatcgtcatgactcagtcgccctcaagcgtcagcgcgtccgtcggggacagagtgatcatcacctgtcgggcgtcccagggaattcgcaactggctggcctggtatcagcagaagcccggaaaggcccccaacctgttgatctacgccgcctcaaacctccaatccggggtgccgagccgcttcagcggctccggttcgggtgccgatttcactctgaccatctcctccctgcaacctgaagatgtggctacctactactgccaaaagtacaactccgcaccttttactttcggaccggggaccaaagtggacattaag

SEQ ID NO: 1523 - protein, 123 aa, synthetic construct
  REGION 1..123: note = source = /note="Description of Artificial Sequence: Synthetic polypeptide"
QVQLQESGPGLVKPSQTLSLTCTVSGGSISSGGYYWSWIRQHPGKGLEWIGYIYYSGSTYYNPSLKSRVTISVDTSKNQFSLKLSSVTAADTAVYYCARAGIAARLRGAFDIWGQGTMVTVSS

SEQ ID NO: 1524 - protein, 107 aa, synthetic construct
  REGION 1..107: note = source = /note="Description of Artificial Sequence: Synthetic polypeptide"
DIVMTQSPSSVSASVGDRVIITCRASQGIRNWLAWYQQKPGKAPNLLIYAASNLQSGVPSRFSGSGSGADFTLTISSLQPEDVATYYCQKYNSAPFTFGPGTKVDIK

SEQ ID NO: 1525 - protein, 489 aa, synthetic construct
  REGION 1..489: note = source = /note="Description of Artificial Sequence: Synthetic polypeptide"
MALPVTALLLPLALLLHAARPQVQLQESGPGLVKPSQTLSLTCTVSGGSISSGGYYWSWIRQHPGKGLEWIGYIYYSGSTYYNPSLKSRVTISVDTSKNQFSLKLSSVTAADTAVYYCARAGIAARLRGAFDIWGQGTMVTVSSGGGGSGGGGSGGGGSDIVMTQSPSSVSASVGDRVIITCRASQGIRNWLAWYQQKPGKAPNLLIYAASNLQSGVPSRFSGSGSGADFTLTISSLQPEDVATYYCQKYNSAPFTFGPGTKVDIKTTTPAPRPPTPAPTIASQPLSLRPEACRPAAGGAVHTRGLDFACDIYIWAPLAGTCGVLLLSLVITLYCKRGRKKLLYIFKQPFMRPVQTTQEEDGCSCRFPEEEEGGCELRVKFSRSADAPAYKQGQNQLYNELNLGRREEYDVLDKRRGRDPEMGGKPRRKNPQEGLYNELQKDKMAEAYSEIGMKGERRRGKGHDGLYQGLSTATKDTYDALHMQALPPR

SEQ ID NO: 1526 - DNA, 1467 bp, synthetic construct
  misc_feature 1..1467: note = source = /note="Description of Artificial Sequence: Synthetic polynucleotide"
  source 1..1467: mol_type = other DNA
atggccctccctgtcaccgccctgctgcttccgctggctcttctgctccacgccgctcggccccaagtgcagcttcaggagagcggcccgggactcgtgaagccgtcccagaccctgtccctgacttgcaccgtgtcgggaggaagcatctcgagcggaggctactattggtcgtggattcggcagcaccctggaaagggcctggaatggatcggctacatctactactccggctcgacctactacaacccatcgctgaagtccagagtgacaatctcagtggacacgtccaagaatcagttcagcctgaagctctcttccgtgactgcggccgacaccgccgtgtactactgcgcacgcgctggaattgccgcccggctgaggggtgccttcgacatttggggacagggcaccatggtcaccgtgtcctccggcggcggaggttccgggggtggaggctcaggaggaggggggtccgacatcgtcatgactcagtcgccctcaagcgtcagcgcgtccgtcggggacagagtgatcatcacctgtcgggcgtcccagggaattcgcaactggctggcctggtatcagcagaagcccggaaaggcccccaacctgttgatctacgccgcctcaaacctccaatccggggtgccgagccgcttcagcggctccggttcgggtgccgatttcactctgaccatctcctccctgcaacctgaagatgtggctacctactactgccaaaagtacaactccgcaccttttactttcggaccggggaccaaagtggacattaagaccactaccccagcaccgaggccacccaccccggctcctaccatcgcctcccagcctctgtccctgcgtccggaggcatgtagacccgcagctggtggggccgtgcatacccggggtcttgacttcgcctgcgatatctacatttgggcccctctggctggtacttgcggggtcctgctgctttcactcgtgatcactctttactgtaagcgcggtcggaagaagctgctgtacatctttaagcaacccttcatgaggcctgtgcagactactcaagaggaggacggctgttcatgccggttcccagaggaggaggaaggcggctgcgaactgcgcgtgaaattcagccgcagcgcagatgctccagcctacaagcaggggcagaaccagctctacaacgaactcaatcttggtcggagagaggagtacgacgtgctggacaagcggagaggacgggacccagaaatgggcgggaagccgcgcagaaagaatccccaagagggcctgtacaacgagctccaaaaggataagatggcagaagcctatagcgagattggtatgaaaggggaacgcagaagaggcaaaggccacgacggactgtaccagggactcagcaccgccaccaaggacacctatgacgctcttcacatgcaggccctgccgcctcgg

SEQ ID NO: 1527 - protein, 253 aa, synthetic construct
  REGION 1..253: note = source = /note="Description of Artificial Sequence: Synthetic polypeptide"
QVQLVQSGAEVKKPGSSVKVSCKASGGTFSSYAISWVRQAPGQGLEWMGGIIPIFGTANYAQKFQGRVTITADESTSTAYMELSSLRSEDTAVYYCARRGGYQLLRWDVGLLRSAFDIWGQGTMVTVSSGGGGSGGGGSGGGGSSYVLTQPPSVSVAPGQTARITCGGNNIGSKSVHWYQQKPGQAPVLVLYGKNNRPSGVPDRFSGSRSGTTASLTITGAQAEDEADYYCSSRDSSGDHLRVFGTGTKVTVL

SEQ ID NO: 1528 - DNA, 759 bp, synthetic construct
  misc_feature 1..759: note = source = /note="Description of Artificial Sequence: Synthetic polynucleotide"
  source 1..759: mol_type = other DNA
caagtgcagctggtccagtcgggcgccgaggtcaagaagcccgggagctctgtgaaagtgtcctgcaaggcctccgggggcacctttagctcctacgccatctcctgggtccgccaagcaccgggtcaaggcctggagtggatggggggaattatccctatcttcggcactgccaactacgcccagaagttccagggacgcgtgaccattaccgcggacgaatccacctccaccgcttatatggagctgtccagcttgcgctcggaagataccgccgtgtactactgcgcccggaggggtggataccagctgctgagatgggacgtgggcctcctgcggtcggcgttcgacatctggggccagggcactatggtcactgtgtccagcggaggaggcggatcgggaggcggcggatcagggggaggcggttccagctacgtgcttactcaacccccttcggtgtccgtggccccgggacagaccgccagaatcacttgcggaggaaacaacattgggtccaagagcgtgcattggtaccagcagaagccaggacaggcccctgtgctggtgctctacgggaagaacaatcggcccagcggagtgccggacaggttctcgggttcacgctccggtacaaccgcttcactgactatcaccggggcccaggcagaggatgaagcggactactactgttcctcccgggattcatccggcgaccacctccgggtgttcggaaccggaacgaaggtcaccgtgctg

SEQ ID NO: 1529 - protein, 129 aa, synthetic construct
  REGION 1..129: note = source = /note="Description of Artificial Sequence: Synthetic polypeptide"
QVQLVQSGAEVKKPGSSVKVSCKASGGTFSSYAISWVRQAPGQGLEWMGGIIPIFGTANYAQKFQGRVTITADESTSTAYMELSSLRSEDTAVYYCARRGGYQLLRWDVGLLRSAFDIWGQGTMVTVSS

SEQ ID NO: 1530 - protein, 109 aa, synthetic construct
  REGION 1..109: note = source = /note="Description of Artificial Sequence: Synthetic polypeptide"
SYVLTQPPSVSVAPGQTARITCGGNNIGSKSVHWYQQKPGQAPVLVLYGKNNRPSGVPDRFSGSRSGTTASLTITGAQAEDEADYYCSSRDSSGDHLRVFGTGTKVTVL

SEQ ID NO: 1531 - protein, 497 aa, synthetic construct
  REGION 1..497: note = source = /note="Description of Artificial Sequence: Synthetic polypeptide"
MALPVTALLLPLALLLHAARPQVQLVQSGAEVKKPGSSVKVSCKASGGTFSSYAISWVRQAPGQGLEWMGGIIPIFGTANYAQKFQGRVTITADESTSTAYMELSSLRSEDTAVYYCARRGGYQLLRWDVGLLRSAFDIWGQGTMVTVSSGGGGSGGGGSGGGGSSYVLTQPPSVSVAPGQTARITCGGNNIGSKSVHWYQQKPGQAPVLVLYGKNNRPSGVPDRFSGSRSGTTASLTITGAQAEDEADYYCSSRDSSGDHLRVFGTGTKVTVLTTTPAPRPPTPAPTIASQPLSLRPEACRPAAGGAVHTRGLDFACDIYIWAPLAGTCGVLLLSLVITLYCKRGRKKLLYIFKQPFMRPVQTTQEEDGCSCRFPEEEEGGCELRVKFSRSADAPAYKQGQNQLYNELNLGRREEYDVLDKRRGRDPEMGGKPRRKNPQEGLYNELQKDKMAEAYSEIGMKGERRRGKGHDGLYQGLSTATKDTYDALHMQALPPR

SEQ ID NO: 1532 - DNA, 1491 bp, synthetic construct
  misc_feature 1..1491: note = source = /note="Description of Artificial Sequence: Synthetic polynucleotide"
  source 1..1491: mol_type = other DNA
atggccctccctgtcaccgccctgctgcttccgctggctcttctgctccacgccgctcggccccaagtgcagctggtccagtcgggcgccgaggtcaagaagcccgggagctctgtgaaagtgtcctgcaaggcctccgggggcacctttagctcctacgccatctcctgggtccgccaagcaccgggtcaaggcctggagtggatggggggaattatccctatcttcggcactgccaactacgcccagaagttccagggacgcgtgaccattaccgcggacgaatccacctccaccgcttatatggagctgtccagcttgcgctcggaagataccgccgtgtactactgcgcccggaggggtggataccagctgctgagatgggacgtgggcctcctgcggtcggcgttcgacatctggggccagggcactatggtcactgtgtccagcggaggaggcggatcgggaggcggcggatcagggggaggcggttccagctacgtgcttactcaacccccttcggtgtccgtggccccgggacagaccgccagaatcacttgcggaggaaacaacattgggtccaagagcgtgcattggtaccagcagaagccaggacaggcccctgtgctggtgctctacgggaagaacaatcggcccagcggagtgccggacaggttctcgggttcacgctccggtacaaccgcttcactgactatcaccggggcccaggcagaggatgaagcggactactactgttcctcccgggattcatccggcgaccacctccgggtgttcggaaccggaacgaaggtcaccgtgctgaccactaccccagcaccgaggccacccaccccggctcctaccatcgcctcccagcctctgtccctgcgtccggaggcatgtagacccgcagctggtggggccgtgcatacccggggtcttgacttcgcctgcgatatctacatttgggcccctctggctggtacttgcggggtcctgctgctttcactcgtgatcactctttactgtaagcgcggtcggaagaagctgctgtacatctttaagcaacccttcatgaggcctgtgcagactactcaagaggaggacggctgttcatgccggttcccagaggaggaggaaggcggctgcgaactgcgcgtgaaattcagccgcagcgcagatgctccagcctacaagcaggggcagaaccagctctacaacgaactcaatcttggtcggagagaggagtacgacgtgctggacaagcggagaggacgggacccagaaatgggcgggaagccgcgcagaaagaatccccaagagggcctgtacaacgagctccaaaaggataagatggcagaagcctatagcgagattggtatgaaaggggaacgcagaagaggcaaaggccacgacggactgtaccagggactcagcaccgccaccaaggacacctatgacgctcttcacatgcaggccctgccgcctcgg

SEQ ID NO: 1533 - protein, 248 aa, synthetic construct
  REGION 1..248: note = source = /note="Description of Artificial Sequence: Synthetic polypeptide"
EVQLQQSGPGLVKPSQTLSLTCAISGDSVSSNSAAWNWIRQSPSRGLEWLGRTYYRSKWYSFYAISLKSRIIINPDTSKNQFSLQLKSVTPEDTAVYYCARSSPEGLFLYWFDPWGQGTLVTVSSGGDGSGGGGSGGGGSSSELTQDPAVSVALGQTIRITCQGDSLGNYYATWYQQKPGQAPVLVIYGTNNRPSGIPDRFSASSSGNTASLTITGAQAEDEADYYCNSRDSSGHHLLFGTGTKVTVL

SEQ ID NO: 1534 - DNA, 744 bp, synthetic construct
  misc_feature 1..744: note = source = /note="Description of Artificial Sequence: Synthetic polynucleotide"
  source 1..744: mol_type = other DNA
gaagtgcagctccaacagtcaggaccggggctcgtgaagccatcccagaccctgtccctgacttgtgccatctcgggagatagcgtgtcatcgaactccgccgcctggaactggattcggcagagcccgtcccgcggactggagtggcttggaaggacctactaccggtccaagtggtactctttctacgcgatctcgctgaagtcccgcattatcattaaccctgatacctccaagaatcagttctccctccaactgaaatccgtcacccccgaggacacagcagtgtattactgcgcacggagcagccccgaaggactgttcctgtattggtttgacccctggggccaggggactcttgtgaccgtgtcgagcggcggagatgggtccggtggcggtggttcggggggcggcggatcatcatccgaactgacccaggacccggctgtgtccgtggcgctgggacaaaccatccgcattacgtgccagggagactccctgggcaactactacgccacttggtaccagcagaagccgggccaagcccctgtgttggtcatctacgggaccaacaacagaccttccggcatccccgaccggttcagcgcttcgtcctccggcaacactgccagcctgaccatcactggagcgcaggccgaagatgaggccgactactactgcaacagcagagactcctcgggtcatcacctcttgttcggaactggaaccaaggtcaccgtgctg

SEQ ID NO: 1535 - protein, 125 aa, synthetic construct
  REGION 1..125: note = source = /note="Description of Artificial Sequence: Synthetic polypeptide"
EVQLQQSGPGLVKPSQTLSLTCAISGDSVSSNSAAWNWIRQSPSRGLEWLGRTYYRSKWYSFYAISLKSRIIINPDTSKNQFSLQLKSVTPEDTAVYYCARSSPEGLFLYWFDPWGQGTLVTVSS

SEQ ID NO: 1536 - protein, 108 aa, synthetic construct
  REGION 1..108: note = source = /note="Description of Artificial Sequence: Synthetic polypeptide"
SSELTQDPAVSVALGQTIRITCQGDSLGNYYATWYQQKPGQAPVLVIYGTNNRPSGIPDRFSASSSGNTASLTITGAQAEDEADYYCNSRDSSGHHLLFGTGTKVTVL

SEQ ID NO: 1537 - protein, 492 aa, synthetic construct
  REGION 1..492: note = source = /note="Description of Artificial Sequence: Synthetic polypeptide"
MALPVTALLLPLALLLHAARPEVQLQQSGPGLVKPSQTLSLTCAISGDSVSSNSAAWNWIRQSPSRGLEWLGRTYYRSKWYSFYAISLKSRIIINPDTSKNQFSLQLKSVTPEDTAVYYCARSSPEGLFLYWFDPWGQGTLVTVSSGGDGSGGGGSGGGGSSSELTQDPAVSVALGQTIRITCQGDSLGNYYATWYQQKPGQAPVLVIYGTNNRPSGIPDRFSASSSGNTASLTITGAQAEDEADYYCNSRDSSGHHLLFGTGTKVTVLTTTPAPRPPTPAPTIASQPLSLRPEACRPAAGGAVHTRGLDFACDIYIWAPLAGTCGVLLLSLVITLYCKRGRKKLLYIFKQPFMRPVQTTQEEDGCSCRFPEEEEGGCELRVKFSRSADAPAYKQGQNQLYNELNLGRREEYDVLDKRRGRDPEMGGKPRRKNPQEGLYNELQKDKMAEAYSEIGMKGERRRGKGHDGLYQGLSTATKDTYDALHMQALPPR

SEQ ID NO: 1538 - DNA, 1476 bp, synthetic construct
  misc_feature 1..1476: note = source = /note="Description of Artificial Sequence: Synthetic polynucleotide"
  source 1..1476: mol_type = other DNA
atggccctccctgtcaccgccctgctgcttccgctggctcttctgctccacgccgctcggcccgaagtgcagctccaacagtcaggaccggggctcgtgaagccatcccagaccctgtccctgacttgtgccatctcgggagatagcgtgtcatcgaactccgccgcctggaactggattcggcagagcccgtcccgcggactggagtggcttggaaggacctactaccggtccaagtggtactctttctacgcgatctcgctgaagtcccgcattatcattaaccctgatacctccaagaatcagttctccctccaactgaaatccgtcacccccgaggacacagcagtgtattactgcgcacggagcagccccgaaggactgttcctgtattggtttgacccctggggccaggggactcttgtgaccgtgtcgagcggcggagatgggtccggtggcggtggttcggggggcggcggatcatcatccgaactgacccaggacccggctgtgtccgtggcgctgggacaaaccatccgcattacgtgccagggagactccctgggcaactactacgccacttggtaccagcagaagccgggccaagcccctgtgttggtcatctacgggaccaacaacagaccttccggcatccccgaccggttcagcgcttcgtcctccggcaacactgccagcctgaccatcactggagcgcaggccgaagatgaggccgactactactgcaacagcagagactcctcgggtcatcacctcttgttcggaactggaaccaaggtcaccgtgctgaccactaccccagcaccgaggccacccaccccggctcctaccatcgcctcccagcctctgtccctgcgtccggaggcatgtagacccgcagctggtggggccgtgcatacccggggtcttgacttcgcctgcgatatctacatttgggcccctctggctggtacttgcggggtcctgctgctttcactcgtgatcactctttactgtaagcgcggtcggaagaagctgctgtacatctttaagcaacccttcatgaggcctgtgcagactactcaagaggaggacggctgttcatgccggttcccagaggaggaggaaggcggctgcgaactgcgcgtgaaattcagccgcagcgcagatgctccagcctacaagcaggggcagaaccagctctacaacgaactcaatcttggtcggagagaggagtacgacgtgctggacaagcggagaggacgggacccagaaatgggcgggaagccgcgcagaaagaatccccaagagggcctgtacaacgagctccaaaaggataagatggcagaagcctatagcgagattggtatgaaaggggaacgcagaagaggcaaaggccacgacggactgtaccagggactcagcaccgccaccaaggacacctatgacgctcttcacatgcaggccctgccgcctcgg

SEQ ID NO: 1539 - protein, 246 aa, synthetic construct
  REGION 1..246: note = source = /note="Description of Artificial Sequence: Synthetic polypeptide"
EVQLVESGGGLVQPGGSLRLSCAASGFTFSSYAMSWVRQAPGKGLEWVSAISGSGGSTYYADSVKGRFTISRDNSKNTLYLQMNSLRAEDTAVYYCAKVEGSGSLDYWGQGTLVTVSSGGGGSGGGGSGGGGSEIVMTQSPGTLSLSPGERATLSCRASQSVSSAYLAWYQQKPGQPPRLLISGASTRATGIPDRFGGSGSGTDFTLTISRLEPEDFAVYYCQHYGSSFNGSSLFTFGQGTRLEIK

SEQ ID NO: 1540 - DNA, 738 bp, synthetic construct
  misc_feature 1..738: note = source = /note="Description of Artificial Sequence: Synthetic polynucleotide"
  source 1..738: mol_type = other DNA
gaagtgcagctcgtggagtcaggaggcggcctggtccagccgggagggtcccttagactgtcatgcgccgcaagcggattcactttctcctcctatgccatgagctgggtccgccaagcccccggaaagggactggaatgggtgtccgccatctcggggtctggaggctcaacttactacgctgactccgtgaagggacggttcaccattagccgcgacaactccaagaacaccctctacctccaaatgaactccctgcgggccgaggataccgccgtctactactgcgccaaagtggaaggttcaggatcgctggactactggggacagggtactctcgtgaccgtgtcatcgggcggaggaggttccggcggtggcggctccggcggcggagggtcggagatcgtgatgacccagagccctggtactctgagcctttcgccgggagaaagggccaccctgtcctgccgcgcttcccaatccgtgtcctccgcgtacttggcgtggtaccagcagaagccgggacagccccctcggctgctgatcagcggggccagcacccgggcaaccggaatcccagacagattcgggggttccggcagcggcacagatttcaccctgactatttcgaggttggagcccgaggactttgcggtgtattactgtcagcactacgggtcgtcctttaatggctccagcctgttcacgttcggacaggggacccgcctggaaatcaag

SEQ ID NO: 1541 - protein, 118 aa, synthetic construct
  REGION 1..118: note = source = /note="Description of Artificial Sequence: Synthetic polypeptide"
EVQLVESGGGLVQPGGSLRLSCAASGFTFSSYAMSWVRQAPGKGLEWVSAISGSGGSTYYADSVKGRFTISRDNSKNTLYLQMNSLRAEDTAVYYCAKVEGSGSLDYWGQGTLVTVSS

SEQ ID NO: 1542 - protein, 113 aa, synthetic construct
  REGION 1..113: note = source = /note="Description of Artificial Sequence: Synthetic polypeptide"
EIVMTQSPGTLSLSPGERATLSCRASQSVSSAYLAWYQQKPGQPPRLLISGASTRATGIPDRFGGSGSGTDFTLTISRLEPEDFAVYYCQHYGSSFNGSSLFTFGQGTRLEIK

SEQ ID NO: 1543 - protein, 490 aa, synthetic construct
  REGION 1..490: note = source = /note="Description of Artificial Sequence: Synthetic polypeptide"
MALPVTALLLPLALLLHAARPEVQLVESGGGLVQPGGSLRLSCAASGFTFSSYAMSWVRQAPGKGLEWVSAISGSGGSTYYADSVKGRFTISRDNSKNTLYLQMNSLRAEDTAVYYCAKVEGSGSLDYWGQGTLVTVSSGGGGSGGGGSGGGGSEIVMTQSPGTLSLSPGERATLSCRASQSVSSAYLAWYQQKPGQPPRLLISGASTRATGIPDRFGGSGSGTDFTLTISRLEPEDFAVYYCQHYGSSFNGSSLFTFGQGTRLEIKTTTPAPRPPTPAPTIASQPLSLRPEACRPAAGGAVHTRGLDFACDIYIWAPLAGTCGVLLLSLVITLYCKRGRKKLLYIFKQPFMRPVQTTQEEDGCSCRFPEEEEGGCELRVKFSRSADAPAYKQGQNQLYNELNLGRREEYDVLDKRRGRDPEMGGKPRRKNPQEGLYNELQKDKMAEAYSEIGMKGERRRGKGHDGLYQGLSTATKDTYDALHMQALPPR

SEQ ID NO: 1544 - DNA, 1470 bp, synthetic construct
  misc_feature 1..1470: note = source = /note="Description of Artificial Sequence: Synthetic polynucleotide"
  source 1..1470: mol_type = other DNA
atggccctccctgtcaccgccctgctgcttccgctggctcttctgctccacgccgctcggcccgaagtgcagctcgtggagtcaggaggcggcctggtccagccgggagggtcccttagactgtcatgcgccgcaagcggattcactttctcctcctatgccatgagctgggtccgccaagcccccggaaagggactggaatgggtgtccgccatctcggggtctggaggctcaacttactacgctgactccgtgaagggacggttcaccattagccgcgacaactccaagaacaccctctacctccaaatgaactccctgcgggccgaggataccgccgtctactactgcgccaaagtggaaggttcaggatcgctggactactggggacagggtactctcgtgaccgtgtcatcgggcggaggaggttccggcggtggcggctccggcggcggagggtcggagatcgtgatgacccagagccctggtactctgagcctttcgccgggagaaagggccaccctgtcctgccgcgcttcccaatccgtgtcctccgcgtacttggcgtggtaccagcagaagccgggacagccccctcggctgctgatcagcggggccagcacccgggcaaccggaatcccagacagattcgggggttccggcagcggcacagatttcaccctgactatttcgaggttggagcccgaggactttgcggtgtattactgtcagcactacgggtcgtcctttaatggctccagcctgttcacgttcggacaggggacccgcctggaaatcaagaccactaccccagcaccgaggccacccaccccggctcctaccatcgcctcccagcctctgtccctgcgtccggaggcatgtagacccgcagctggtggggccgtgcatacccggggtcttgacttcgcctgcgatatctacatttgggcccctctggctggtacttgcggggtcctgctgctttcactcgtgatcactctttactgtaagcgcggtcggaagaagctgctgtacatctttaagcaacccttcatgaggcctgtgcagactactcaagaggaggacggctgttcatgccggttcccagaggaggaggaaggcggctgcgaactgcgcgtgaaattcagccgcagcgcagatgctccagcctacaagcaggggcagaaccagctctacaacgaactcaatcttggtcggagagaggagtacgacgtgctggacaagcggagaggacgggacccagaaatgggcgggaagccgcgcagaaagaatccccaagagggcctgtacaacgagctccaaaaggataagatggcagaagcctatagcgagattggtatgaaaggggaacgcagaagaggcaaaggccacgacggactgtaccagggactcagcaccgccaccaaggacacctatgacgctcttcacatgcaggccctgccgcctcgg

SEQ ID NO: 1545 - protein, 241 aa, synthetic construct
  REGION 1..241: note = source = /note="Description of Artificial Sequence: Synthetic polypeptide"
EVQLVETGGGLVQPGGSLRLSCAASGITFSRYPMSWVRQAPGKGLEWVSGISDSGVSTYYADSAKGRFTISRDNSKNTLFLQMSSLRDEDTAVYYCVTRAGSEASDIWGQGTMVTVSSGGGGSGGGGSGGGGSEIVLTQSPATLSLSPGERATLSCRASQSVSNSLAWYQQKPGQAPRLLIYDASSRATGIPDRFSGSGSGTDFTLTISRLEPEDFAIYYCQQFGTSSGLTFGGGTKLEIK

SEQ ID NO: 1546 - DNA, 723 bp, synthetic construct
  misc_feature 1..723: note = source = /note="Description of Artificial Sequence: Synthetic polynucleotide"
  source 1..723: mol_type = other DNA
gaagtgcaactggtggaaaccggtggcggcctggtgcagcctggaggatcattgaggctgtcatgcgcggccagcggtattaccttctcccggtaccccatgtcctgggtcagacaggccccggggaaagggcttgaatgggtgtccgggatctcggactccggtgtcagcacttactacgccgactccgccaagggacgcttcaccatttcccgggacaactcgaagaacaccctgttcctccaaatgagctccctccgggacgaggatactgcagtgtactactgcgtgacccgcgccgggtccgaggcgtctgacatttggggacagggcactatggtcaccgtgtcgtccggcggagggggctcgggaggcggtggcagcggaggaggagggtccgagatcgtgctgacccaatccccggccaccctctcgctgagccctggagaaagggcaaccttgtcctgtcgcgcgagccagtccgtgagcaactccctggcctggtaccagcagaagcccggacaggctccgagacttctgatctacgacgcttcgagccgggccactggaatccccgaccgcttttcggggtccggctcaggaaccgatttcaccctgacaatctcacggctggagccagaggatttcgccatctattactgccagcagttcggtacttcctccggcctgactttcggaggcggcacgaagctcgaaatcaag

SEQ ID NO: 1547 - protein, 118 aa, synthetic construct
  REGION 1..118: note = source = /note="Description of Artificial Sequence: Synthetic polypeptide"
EVQLVETGGGLVQPGGSLRLSCAASGITFSRYPMSWVRQAPGKGLEWVSGISDSGVSTYYADSAKGRFTISRDNSKNTLFLQMSSLRDEDTAVYYCVTRAGSEASDIWGQGTMVTVSS

SEQ ID NO: 1548 - protein, 108 aa, synthetic construct
  REGION 1..108: note = source = /note="Description of Artificial Sequence: Synthetic polypeptide"
EIVLTQSPATLSLSPGERATLSCRASQSVSNSLAWYQQKPGQAPRLLIYDASSRATGIPDRFSGSGSGTDFTLTISRLEPEDFAIYYCQQFGTSSGLTFGGGTKLEIK

SEQ ID NO: 1549 - protein, 485 aa, synthetic construct
  REGION 1..485: note = source = /note="Description of Artificial Sequence: Synthetic polypeptide"
MALPVTALLLPLALLLHAARPEVQLVETGGGLVQPGGSLRLSCAASGITFSRYPMSWVRQAPGKGLEWVSGISDSGVSTYYADSAKGRFTISRDNSKNTLFLQMSSLRDEDTAVYYCVTRAGSEASDIWGQGTMVTVSSGGGGSGGGGSGGGGSEIVLTQSPATLSLSPGERATLSCRASQSVSNSLAWYQQKPGQAPRLLIYDASSRATGIPDRFSGSGSGTDFTLTISRLEPEDFAIYYCQQFGTSSGLTFGGGTKLEIKTTTPAPRPPTPAPTIASQPLSLRPEACRPAAGGAVHTRGLDFACDIYIWAPLAGTCGVLLLSLVITLYCKRGRKKLLYIFKQPFMRPVQTTQEEDGCSCRFPEEEEGGCELRVKFSRSADAPAYKQGQNQLYNELNLGRREEYDVLDKRRGRDPEMGGKPRRKNPQEGLYNELQKDKMAEAYSEIGMKGERRRGKGHDGLYQGLSTATKDTYDALHMQALPPR

SEQ ID NO: 1550 - DNA, 1455 bp, synthetic construct
  misc_feature 1..1455: note = source = /note="Description of Artificial Sequence: Synthetic polynucleotide"
  source 1..1455: mol_type = other DNA
atggccctccctgtcaccgccctgctgcttccgctggctcttctgctccacgccgctcggcccgaagtgcaactggtggaaaccggtggcggcctggtgcagcctggaggatcattgaggctgtcatgcgcggccagcggtattaccttctcccggtaccccatgtcctgggtcagacaggccccggggaaagggcttgaatgggtgtccgggatctcggactccggtgtcagcacttactacgccgactccgccaagggacgcttcaccatttcccgggacaactcgaagaacaccctgttcctccaaatgagctccctccgggacgaggatactgcagtgtactactgcgtgacccgcgccgggtccgaggcgtctgacatttggggacagggcactatggtcaccgtgtcgtccggcggagggggctcgggaggcggtggcagcggaggaggagggtccgagatcgtgctgacccaatccccggccaccctctcgctgagccctggagaaagggcaaccttgtcctgtcgcgcgagccagtccgtgagcaactccctggcctggtaccagcagaagcccggacaggctccgagacttctgatctacgacgcttcgagccgggccactggaatccccgaccgcttttcggggtccggctcaggaaccgatttcaccctgacaatctcacggctggagccagaggatttcgccatctattactgccagcagttcggtacttcctccggcctgactttcggaggcggcacgaagctcgaaatcaagaccactaccccagcaccgaggccacccaccccggctcctaccatcgcctcccagcctctgtccctgcgtccggaggcatgtagacccgcagctggtggggccgtgcatacccggggtcttgacttcgcctgcgatatctacatttgggcccctctggctggtacttgcggggtcctgctgctttcactcgtgatcactctttactgtaagcgcggtcggaagaagctgctgtacatctttaagcaacccttcatgaggcctgtgcagactactcaagaggaggacggctgttcatgccggttcccagaggaggaggaaggcggctgcgaactgcgcgtgaaattcagccgcagcgcagatgctccagcctacaagcaggggcagaaccagctctacaacgaactcaatcttggtcggagagaggagtacgacgtgctggacaagcggagaggacgggacccagaaatgggcgggaagccgcgcagaaagaatccccaagagggcctgtacaacgagctccaaaaggataagatggcagaagcctatagcgagattggtatgaaaggggaacgcagaagaggcaaaggccacgacggactgtaccagggactcagcaccgccaccaaggacacctatgacgctcttcacatgcaggccctgccgcctcgg

SEQ ID NO: 1551 - protein, 248 aa, synthetic construct
  REGION 1..248: note = source = /note="Description of Artificial Sequence: Synthetic polypeptide"
QVQLVESGGGLVQPGGSLRLSCAASGFTFSSYAMSWVRQAPGKGLEWVSAISGSGGSTYYADSVKGRFTISRDNAKNSLYLQMNSLRAEDTAIYYCARATYKRELRYYYGMDVWGQGTMVTVSSGGGGSGGGGSGGGGSEIVMTQSPGTVSLSPGERATLSCRASQSVSSSFLAWYQQKPGQAPRLLIYGASSRATGIPDRFSGSGSGTDFTLTISRLEPEDSAVYYCQQYHSSPSWTFGQGTRLEIK

SEQ ID NO: 1552 - DNA, 744 bp, synthetic construct
  misc_feature 1..744: note = source = /note="Description of Artificial Sequence: Synthetic polynucleotide"
  source 1..744: mol_type = other DNA
caagtgcagctcgtggaatcgggtggcggactggtgcagccggggggctcacttagactgtcctgcgcggccagcggattcactttctcctcctacgccatgtcctgggtcagacaggcccctggaaagggcctggaatgggtgtccgcaatcagcggcagcggcggctcgacctattacgcggattcagtgaagggcagattcaccatttcccgggacaacgccaagaactccttgtaccttcaaatgaactccctccgcgcggaagataccgcaatctactactgcgctcgggccacttacaagagggaactgcgctactactacgggatggacgtctggggccagggaaccatggtcaccgtgtccagcggaggaggaggatcgggaggaggcggtagcgggggtggagggtcggagatcgtgatgacccagtcccccggcactgtgtcgctgtcccccggcgaacgggccaccctgtcatgtcgggccagccagtcagtgtcgtcaagcttcctcgcctggtaccagcagaaaccgggacaagctccccgcctgctgatctacggagccagcagccgggccaccggtattcctgaccggttctccggttcggggtccgggaccgactttactctgactatctctcgcctcgagccagaggactccgccgtgtattactgccagcagtaccactcctccccgtcctggacgttcggacagggcacaaggctggagattaag

SEQ ID NO: 1553 - protein, 124 aa, synthetic construct
  REGION 1..124: note = source = /note="Description of Artificial Sequence: Synthetic polypeptide"
QVQLVESGGGLVQPGGSLRLSCAASGFTFSSYAMSWVRQAPGKGLEWVSAISGSGGSTYYADSVKGRFTISRDNAKNSLYLQMNSLRAEDTAIYYCARATYKRELRYYYGMDVWGQGTMVTVSS

SEQ ID NO: 1554 - protein, 109 aa, synthetic construct
  REGION 1..109: note = source = /note="Description of Artificial Sequence: Synthetic polypeptide"
EIVMTQSPGTVSLSPGERATLSCRASQSVSSSFLAWYQQKPGQAPRLLIYGASSRATGIPDRFSGSGSGTDFTLTISRLEPEDSAVYYCQQYHSSPSWTFGQGTRLEIK

SEQ ID NO: 1555 - protein, 492 aa, synthetic construct
  REGION 1..492: note = source = /note="Description of Artificial Sequence: Synthetic polypeptide"
MALPVTALLLPLALLLHAARPQVQLVESGGGLVQPGGSLRLSCAASGFTFSSYAMSWVRQAPGKGLEWVSAISGSGGSTYYADSVKGRFTISRDNAKNSLYLQMNSLRAEDTAIYYCARATYKRELRYYYGMDVWGQGTMVTVSSGGGGSGGGGSGGGGSEIVMTQSPGTVSLSPGERATLSCRASQSVSSSFLAWYQQKPGQAPRLLIYGASSRATGIPDRFSGSGSGTDFTLTISRLEPEDSAVYYCQQYHSSPSWTFGQGTRLEIKTTTPAPRPPTPAPTIASQPLSLRPEACRPAAGGAVHTRGLDFACDIYIWAPLAGTCGVLLLSLVITLYCKRGRKKLLYIFKQPFMRPVQTTQEEDGCSCRFPEEEEGGCELRVKFSRSADAPAYKQGQNQLYNELNLGRREEYDVLDKRRGRDPEMGGKPRRKNPQEGLYNELQKDKMAEAYSEIGMKGERRRGKGHDGLYQGLSTATKDTYDALHMQALPPR

SEQ ID NO: 1556 - DNA, 1476 bp, synthetic construct
  misc_feature 1..1476: note = source = /note="Description of Artificial Sequence: Synthetic polynucleotide"
  source 1..1476: mol_type = other DNA
atggccctccctgtcaccgccctgctgcttccgctggctcttctgctccacgccgctcggccccaagtgcagctcgtggaatcgggtggcggactggtgcagccggggggctcacttagactgtcctgcgcggccagcggattcactttctcctcctacgccatgtcctgggtcagacaggcccctggaaagggcctggaatgggtgtccgcaatcagcggcagcggcggctcgacctattacgcggattcagtgaagggcagattcaccatttcccgggacaacgccaagaactccttgtaccttcaaatgaactccctccgcgcggaagataccgcaatctactactgcgctcgggccacttacaagagggaactgcgctactactacgggatggacgtctggggccagggaaccatggtcaccgtgtccagcggaggaggaggatcgggaggaggcggtagcgggggtggagggtcggagatcgtgatgacccagtcccccggcactgtgtcgctgtcccccggcgaacgggccaccctgtcatgtcgggccagccagtcagtgtcgtcaagcttcctcgcctggtaccagcagaaaccgggacaagctccccgcctgctgatctacggagccagcagccgggccaccggtattcctgaccggttctccggttcggggtccgggaccgactttactctgactatctctcgcctcgagccagaggactccgccgtgtattactgccagcagtaccactcctccccgtcctggacgttcggacagggcacaaggctggagattaagaccactaccccagcaccgaggccacccaccccggctcctaccatcgcctcccagcctctgtccctgcgtccggaggcatgtagacccgcagctggtggggccgtgcatacccggggtcttgacttcgcctgcgatatctacatttgggcccctctggctggtacttgcggggtcctgctgctttcactcgtgatcactctttactgtaagcgcggtcggaagaagctgctgtacatctttaagcaacccttcatgaggcctgtgcagactactcaagaggaggacggctgttcatgccggttcccagaggaggaggaaggcggctgcgaactgcgcgtgaaattcagccgcagcgcagatgctccagcctacaagcaggggcagaaccagctctacaacgaactcaatcttggtcggagagaggagtacgacgtgctggacaagcggagaggacgggacccagaaatgggcgggaagccgcgcagaaagaatccccaagagggcctgtacaacgagctccaaaaggataagatggcagaagcctatagcgagattggtatgaaaggggaacgcagaagaggcaaaggccacgacggactgtaccagggactcagcaccgccaccaaggacacctatgacgctcttcacatgcaggccctgccgcctcgg

SEQ ID NO: 1557 - protein, 248 aa, synthetic construct
  REGION 1..248: note = source = /note="Description of Artificial Sequence: Synthetic polypeptide"
EVQLVETGGGLVQPGGSLRLSCAASGFTFSSYAMSWVRQAPGKGLEWVSAISGSGGSTYYADSVKGRFTISRDNSKNTLYLQMNTLKAEDTAVYYCARATYKRELRYYYGMDVWGQGTTVTVSSGGGGSGGGGSGGGGSEIVLTQSPSTLSLSPGESATLSCRASQSVSTTFLAWYQQKPGQAPRLLIYGSSNRATGIPDRFSGSGSGTDFTLTIRRLEPEDFAVYYCQQYHSSPSWTFGQGTKVEIK

SEQ ID NO: 1558 - DNA, 744 bp, synthetic construct
  misc_feature 1..744: note = source = /note="Description of Artificial Sequence: Synthetic polynucleotide"
  source 1..744: mol_type = other DNA
gaggtgcagcttgtggaaaccggtggcggactggtgcagcccggaggaagcctcaggctgtcctgcgccgcgtccggcttcaccttctcctcgtacgccatgtcctgggtccgccaggcccccggaaagggcctggaatgggtgtccgccatctctggaagcggaggttccacgtactacgcggacagcgtcaagggaaggttcacaatctcccgcgataattcgaagaacactctgtaccttcaaatgaacaccctgaaggccgaggacactgctgtgtactactgcgcacgggccacctacaagagagagctccggtactactacggaatggacgtctggggccagggaactactgtgaccgtgtcctcgggagggggtggctccggggggggcggctccggcggaggcggttccgagattgtgctgacccagtcaccttcaactctgtcgctgtccccgggagagagcgctactctgagctgccgggccagccagtccgtgtccaccaccttcctcgcctggtatcagcagaagccggggcaggcaccacggctcttgatctacgggtcaagcaacagagcgaccggaattcctgaccgcttctcggggagcggttcaggcaccgacttcaccctgactatccggcgcctggaacccgaagatttcgccgtgtattactgtcaacagtaccactcctcgccgtcctggacctttggccaaggaaccaaagtggaaatcaag

SEQ ID NO: 1559 - protein, 124 aa, synthetic construct
  REGION 1..124: note = source = /note="Description of Artificial Sequence: Synthetic polypeptide"
EVQLVETGGGLVQPGGSLRLSCAASGFTFSSYAMSWVRQAPGKGLEWVSAISGSGGSTYYADSVKGRFTISRDNSKNTLYLQMNTLKAEDTAVYYCARATYKRELRYYYGMDVWGQGTTVTVSS

SEQ ID NO: 1560 - protein, 109 aa, synthetic construct
  REGION 1..109: note = source = /note="Description of Artificial Sequence: Synthetic polypeptide"
EIVLTQSPSTLSLSPGESATLSCRASQSVSTTFLAWYQQKPGQAPRLLIYGSSNRATGIPDRFSGSGSGTDFTLTIRRLEPEDFAVYYCQQYHSSPSWTFGQGTKVEIK

SEQ ID NO: 1561 - protein, 492 aa, synthetic construct
  REGION 1..492: note = source = /note="Description of Artificial Sequence: Synthetic polypeptide"
MALPVTALLLPLALLLHAARPEVQLVETGGGLVQPGGSLRLSCAASGFTFSSYAMSWVRQAPGKGLEWVSAISGSGGSTYYADSVKGRFTISRDNSKNTLYLQMNTLKAEDTAVYYCARATYKRELRYYYGMDVWGQGTTVTVSSGGGGSGGGGSGGGGSEIVLTQSPSTLSLSPGESATLSCRASQSVSTTFLAWYQQKPGQAPRLLIYGSSNRATGIPDRFSGSGSGTDFTLTIRRLEPEDFAVYYCQQYHSSPSWTFGQGTKVEIKTTTPAPRPPTPAPTIASQPLSLRPEACRPAAGGAVHTRGLDFACDIYIWAPLAGTCGVLLLSLVITLYCKRGRKKLLYIFKQPFMRPVQTTQEEDGCSCRFPEEEEGGCELRVKFSRSADAPAYKQGQNQLYNELNLGRREEYDVLDKRRGRDPEMGGKPRRKNPQEGLYNELQKDKMAEAYSEIGMKGERRRGKGHDGLYQGLSTATKDTYDALHMQALPPR

SEQ ID NO: 1562 - DNA, 1476 bp, synthetic construct
  misc_feature 1..1476: note = source = /note="Description of Artificial Sequence: Synthetic polynucleotide"
  source 1..1476: mol_type = other DNA
atggccctccctgtcaccgccctgctgcttccgctggctcttctgctccacgccgctcggcccgaggtgcagcttgtggaaaccggtggcggactggtgcagcccggaggaagcctcaggctgtcctgcgccgcgtccggcttcaccttctcctcgtacgccatgtcctgggtccgccaggcccccggaaagggcctggaatgggtgtccgccatctctggaagcggaggttccacgtactacgcggacagcgtcaagggaaggttcacaatctcccgcgataattcgaagaacactctgtaccttcaaatgaacaccctgaaggccgaggacactgctgtgtactactgcgcacgggccacctacaagagagagctccggtactactacggaatggacgtctggggccagggaactactgtgaccgtgtcctcgggagggggtggctccggggggggcggctccggcggaggcggttccgagattgtgctgacccagtcaccttcaactctgtcgctgtccccgggagagagcgctactctgagctgccgggccagccagtccgtgtccaccaccttcctcgcctggtatcagcagaagccggggcaggcaccacggctcttgatctacgggtcaagcaacagagcgaccggaattcctgaccgcttctcggggagcggttcaggcaccgacttcaccctgactatccggcgcctggaacccgaagatttcgccgtgtattactgtcaacagtaccactcctcgccgtcctggacctttggccaaggaaccaaagtggaaatcaagaccactaccccagcaccgaggccacccaccccggctcctaccatcgcctcccagcctctgtccctgcgtccggaggcatgtagacccgcagctggtggggccgtgcatacccggggtcttgacttcgcctgcgatatctacatttgggcccctctggctggtacttgcggggtcctgctgctttcactcgtgatcactctttactgtaagcgcggtcggaagaagctgctgtacatctttaagcaacccttcatgaggcctgtgcagactactcaagaggaggacggctgttcatgccggttcccagaggaggaggaaggcggctgcgaactgcgcgtgaaattcagccgcagcgcagatgctccagcctacaagcaggggcagaaccagctctacaacgaactcaatcttggtcggagagaggagtacgacgtgctggacaagcggagaggacgggacccagaaatgggcgggaagccgcgcagaaagaatccccaagagggcctgtacaacgagctccaaaaggataagatggcagaagcctatagcgagattggtatgaaaggggaacgcagaagaggcaaaggccacgacggactgtaccagggactcagcaccgccaccaaggacacctatgacgctcttcacatgcaggccctgccgcctcgg

SEQ ID NO: 1563 - protein, 239 aa, synthetic construct
  REGION 1..239: note = source = /note="Description of Artificial Sequence: Synthetic polypeptide"
EVQLVETGGGLVQPGRSLRLSCAASGFTFDDYAMHWVRQAPGKGLEWVSGISWNSGSIGYADSVKGRFTISRDNAKNSLYLQMNSLRDEDTAVYYCARVGKAVPDVWGQGTTVTVSSGGGGSGGGGSGGGGSDIVMTQTPSSLSASVGDRVTITCRASQSISSYLNWYQQKPGKAPKLLIYAASSLQSGVPSRFSGSGSGTDFTLTISSLQPEDFATYYCQQSYSTPYSFGQGTRLEIK

SEQ ID NO: 1564 - DNA, 717 bp, synthetic construct
  misc_feature 1..717: note = source = /note="Description of Artificial Sequence: Synthetic polynucleotide"
  source 1..717: mol_type = other DNA
gaagtgcagctcgtggaaactggaggtggactcgtgcagcctggacggtcgctgcggctgagctgcgctgcatccggcttcaccttcgacgattatgccatgcactgggtcagacaggcgccagggaagggacttgagtgggtgtccggtatcagctggaatagcggctcaatcggatacgcggactccgtgaagggaaggttcaccatttcccgcgacaacgccaagaactccctgtacttgcaaatgaacagcctccgggatgaggacactgccgtgtactactgcgcccgcgtcggaaaagctgtgcccgacgtctggggccagggaaccactgtgaccgtgtccagcggcgggggtggatcgggcggtggagggtccggtggagggggctcagatattgtgatgacccagaccccctcgtccctgtccgcctcggtcggcgaccgcgtgactatcacatgtagagcctcgcagagcatctccagctacctgaactggtatcagcagaagccggggaaggccccgaagctcctgatctacgcggcatcatcactgcaatcgggagtgccgagccggttttccgggtccggctccggcaccgacttcacgctgaccatttcttccctgcaacccgaggacttcgccacttactactgccagcagtcctactccaccccttactccttcggccaaggaaccaggctggaaatcaag

SEQ ID NO: 1565 - protein, 117 aa, synthetic construct
  REGION 1..117: note = source = /note="Description of Artificial Sequence: Synthetic polypeptide"
EVQLVETGGGLVQPGRSLRLSCAASGFTFDDYAMHWVRQAPGKGLEWVSGISWNSGSIGYADSVKGRFTISRDNAKNSLYLQMNSLRDEDTAVYYCARVGKAVPDVWGQGTTVTVSS

SEQ ID NO: 1566 - protein, 107 aa, synthetic construct
  REGION 1..107: note = source = /note="Description of Artificial Sequence: Synthetic polypeptide"
DIVMTQTPSSLSASVGDRVTITCRASQSISSYLNWYQQKPGKAPKLLIYAASSLQSGVPSRFSGSGSGTDFTLTISSLQPEDFATYYCQQSYSTPYSFGQGTRLEIK

SEQ ID NO: 1567 - protein, 483 aa, synthetic construct
  REGION 1..483: note = source = /note="Description of Artificial Sequence: Synthetic polypeptide"
MALPVTALLLPLALLLHAARPEVQLVETGGGLVQPGRSLRLSCAASGFTFDDYAMHWVRQAPGKGLEWVSGISWNSGSIGYADSVKGRFTISRDNAKNSLYLQMNSLRDEDTAVYYCARVGKAVPDVWGQGTTVTVSSGGGGSGGGGSGGGGSDIVMTQTPSSLSASVGDRVTITCRASQSISSYLNWYQQKPGKAPKLLIYAASSLQSGVPSRFSGSGSGTDFTLTISSLQPEDFATYYCQQSYSTPYSFGQGTRLEIKTTTPAPRPPTPAPTIASQPLSLRPEACRPAAGGAVHTRGLDFACDIYIWAPLAGTCGVLLLSLVITLYCKRGRKKLLYIFKQPFMRPVQTTQEEDGCSCRFPEEEEGGCELRVKFSRSADAPAYKQGQNQLYNELNLGRREEYDVLDKRRGRDPEMGGKPRRKNPQEGLYNELQKDKMAEAYSEIGMKGERRRGKGHDGLYQGLSTATKDTYDALHMQALPPR

SEQ ID NO: 1568 - DNA, 1449 bp, synthetic construct
  misc_feature 1..1449: note = source = /note="Description of Artificial Sequence: Synthetic polynucleotide"
  source 1..1449: mol_type = other DNA
atggccctccctgtcaccgccctgctgcttccgctggctcttctgctccacgccgctcggcccgaagtgcagctcgtggaaactggaggtggactcgtgcagcctggacggtcgctgcggctgagctgcgctgcatccggcttcaccttcgacgattatgccatgcactgggtcagacaggcgccagggaagggacttgagtgggtgtccggtatcagctggaatagcggctcaatcggatacgcggactccgtgaagggaaggttcaccatttcccgcgacaacgccaagaactccctgtacttgcaaatgaacagcctccgggatgaggacactgccgtgtactactgcgcccgcgtcggaaaagctgtgcccgacgtctggggccagggaaccactgtgaccgtgtccagcggcgggggtggatcgggcggtggagggtccggtggagggggctcagatattgtgatgacccagaccccctcgtccctgtccgcctcggtcggcgaccgcgtgactatcacatgtagagcctcgcagagcatctccagctacctgaactggtatcagcagaagccggggaaggccccgaagctcctgatctacgcggcatcatcactgcaatcgggagtgccgagccggttttccgggtccggctccggcaccgacttcacgctgaccatttcttccctgcaacccgaggacttcgccacttactactgccagcagtcctactccaccccttactccttcggccaaggaaccaggctggaaatcaagaccactaccccagcaccgaggccacccaccccggctcctaccatcgcctcccagcctctgtccctgcgtccggaggcatgtagacccgcagctggtggggccgtgcatacccggggtcttgacttcgcctgcgatatctacatttgggcccctctggctggtacttgcggggtcctgctgctttcactcgtgatcactctttactgtaagcgcggtcggaagaagctgctgtacatctttaagcaacccttcatgaggcctgtgcagactactcaagaggaggacggctgttcatgccggttcccagaggaggaggaaggcggctgcgaactgcgcgtgaaattcagccgcagcgcagatgctccagcctacaagcaggggcagaaccagctctacaacgaactcaatcttggtcggagagaggagtacgacgtgctggacaagcggagaggacgggacccagaaatgggcgggaagccgcgcagaaagaatccccaagagggcctgtacaacgagctccaaaaggataagatggcagaagcctatagcgagattggtatgaaaggggaacgcagaagaggcaaaggccacgacggactgtaccagggactcagcaccgccaccaaggacacctatgacgctcttcacatgcaggccctgccgcctcgg

SEQ ID NO: 1569 - protein, 246 aa, synthetic construct
  REGION 1..246: note = source = /note="Description of Artificial Sequence: Synthetic polypeptide"
EVQLVESGGGLVQPGRSLRLSCTASGFTFDDYAMHWVRQRPGKGLEWVASINWKGNSLAYGDSVKGRFAISRDNAKNTVFLQMNSLRTEDTAVYYCASHQGVAYYNYAMDVWGRGTLVTVSSGGGGSGGGGSGGGGSEIVLTQSPGTLSLSPGERATLSCRATQSIGSSFLAWYQQRPGQAPRLLIYGASQRATGIPDRFSGRGSGTDFTLTISRVEPEDSAVYYCQHYESSPSWTFGQGTKVEIK

SEQ ID NO: 1570 - DNA, 738 bp, synthetic construct
  misc_feature 1..738: note = source = /note="Description of Artificial Sequence: Synthetic polynucleotide"
  source 1..738: mol_type = other DNA
gaagtgcagctcgtggagagcgggggaggattggtgcagcccggaaggtccctgcggctctcctgcactgcgtctggcttcaccttcgacgactacgcgatgcactgggtcagacagcgcccgggaaagggcctggaatgggtcgcctcaatcaactggaagggaaactccctggcctatggcgacagcgtgaagggccgcttcgccatttcgcgcgacaacgccaagaacaccgtgtttctgcaaatgaattccctgcggaccgaggataccgctgtgtactactgcgccagccaccagggcgtggcatactataactacgccatggacgtgtggggaagagggacgctcgtcaccgtgtcctccgggggcggtggatcgggtggaggaggaagcggtggcgggggcagcgaaatcgtgctgactcagagcccgggaactctttcactgtccccgggagaacgggccactctctcgtgccgggccacccagtccatcggctcctccttccttgcctggtaccagcagaggccaggacaggcgccccgcctgctgatctacggtgcttcccaacgcgccactggcattcctgaccggttcagcggcagagggtcgggaaccgatttcacactgaccatttcccgggtggagcccgaagattcggcagtctactactgtcagcattacgagtcctccccttcatggaccttcggtcaagggaccaaagtggagatcaag

SEQ ID NO: 1571 - protein, 122 aa, synthetic construct
  REGION 1..122: note = source = /note="Description of Artificial Sequence: Synthetic polypeptide"
EVQLVESGGGLVQPGRSLRLSCTASGFTFDDYAMHWVRQRPGKGLEWVASINWKGNSLAYGDSVKGRFAISRDNAKNTVFLQMNSLRTEDTAVYYCASHQGVAYYNYAMDVWGRGTLVTVSS

SEQ ID NO: 1572 - protein, 109 aa, synthetic construct
  REGION 1..109: note = source = /note="Description of Artificial Sequence: Synthetic polypeptide"
EIVLTQSPGTLSLSPGERATLSCRATQSIGSSFLAWYQQRPGQAPRLLIYGASQRATGIPDRFSGRGSGTDFTLTISRVEPEDSAVYYCQHYESSPSWTFGQGTKVEIK

SEQ ID NO: 1573 - protein, 490 aa, synthetic construct
  REGION 1..490: note = source = /note="Description of Artificial Sequence: Synthetic polypeptide"
MALPVTALLLPLALLLHAARPEVQLVESGGGLVQPGRSLRLSCTASGFTFDDYAMHWVRQRPGKGLEWVASINWKGNSLAYGDSVKGRFAISRDNAKNTVFLQMNSLRTEDTAVYYCASHQGVAYYNYAMDVWGRGTLVTVSSGGGGSGGGGSGGGGSEIVLTQSPGTLSLSPGERATLSCRATQSIGSSFLAWYQQRPGQAPRLLIYGASQRATGIPDRFSGRGSGTDFTLTISRVEPEDSAVYYCQHYESSPSWTFGQGTKVEIKTTTPAPRPPTPAPTIASQPLSLRPEACRPAAGGAVHTRGLDFACDIYIWAPLAGTCGVLLLSLVITLYCKRGRKKLLYIFKQPFMRPVQTTQEEDGCSCRFPEEEEGGCELRVKFSRSADAPAYKQGQNQLYNELNLGRREEYDVLDKRRGRDPEMGGKPRRKNPQEGLYNELQKDKMAEAYSEIGMKGERRRGKGHDGLYQGLSTATKDTYDALHMQALPPR

SEQ ID NO: 1574 - DNA, 1470 bp, synthetic construct
  misc_feature 1..1470: note = source = /note="Description of Artificial Sequence: Synthetic polynucleotide"
  source 1..1470: mol_type = other DNA
atggccctccctgtcaccgccctgctgcttccgctggctcttctgctccacgccgctcggcccgaagtgcagctcgtggagagcgggggaggattggtgcagcccggaaggtccctgcggctctcctgcactgcgtctggcttcaccttcgacgactacgcgatgcactgggtcagacagcgcccgggaaagggcctggaatgggtcgcctcaatcaactggaagggaaactccctggcctatggcgacagcgtgaagggccgcttcgccatttcgcgcgacaacgccaagaacaccgtgtttctgcaaatgaattccctgcggaccgaggataccgctgtgtactactgcgccagccaccagggcgtggcatactataactacgccatggacgtgtggggaagagggacgctcgtcaccgtgtcctccgggggcggtggatcgggtggaggaggaagcggtggcgggggcagcgaaatcgtgctgactcagagcccgggaactctttcactgtccccgggagaacgggccactctctcgtgccgggccacccagtccatcggctcctccttccttgcctggtaccagcagaggccaggacaggcgccccgcctgctgatctacggtgcttcccaacgcgccactggcattcctgaccggttcagcggcagagggtcgggaaccgatttcacactgaccatttcccgggtggagcccgaagattcggcagtctactactgtcagcattacgagtcctccccttcatggaccttcggtcaagggaccaaagtggagatcaagaccactaccccagcaccgaggccacccaccccggctcctaccatcgcctcccagcctctgtccctgcgtccggaggcatgtagacccgcagctggtggggccgtgcatacccggggtcttgacttcgcctgcgatatctacatttgggcccctctggctggtacttgcggggtcctgctgctttcactcgtgatcactctttactgtaagcgcggtcggaagaagctgctgtacatctttaagcaacccttcatgaggcctgtgcagactactcaagaggaggacggctgttcatgccggttcccagaggaggaggaaggcggctgcgaactgcgcgtgaaattcagccgcagcgcagatgctccagcctacaagcaggggcagaaccagctctacaacgaactcaatcttggtcggagagaggagtacgacgtgctggacaagcggagaggacgggacccagaaatgggcgggaagccgcgcagaaagaatccccaagagggcctgtacaacgagctccaaaaggataagatggcagaagcctatagcgagattggtatgaaaggggaacgcagaagaggcaaaggccacgacggactgtaccagggactcagcaccgccaccaaggacacctatgacgctcttcacatgcaggccctgccgcctcgg

SEQ ID NO: 1575 - protein, 241 aa, synthetic construct
  REGION 1..241: note = source = /note="Description of Artificial Sequence: Synthetic polypeptide"
EVQLVESGGGLVQPGGSLRLSCAASGFTFSSYAMSWVRQAPGKGLEWVSAISGSGGSTYYADSVKGRFTISRDNSKNTLYLQMNSLRAEDTAVYYCAKVVRDGMDVWGQGTTVTVSSGGGGSGGGGSGGGGSEIVLTQSPATLSLSPGERATLSCRASQSVSSSYLAWYQQKPGQAPRLLIYGASSRATGIPDRFSGNGSGTDFTLTISRLEPEDFAVYYCQQYGSPPRFTFGPGTKVDIK

SEQ ID NO: 1576 - DNA, 723 bp, synthetic construct
  misc_feature 1..723: note = source = /note="Description of Artificial Sequence: Synthetic polynucleotide"
  source 1..723: mol_type = other DNA
gaggtgcagttggtcgaaagcgggggcgggcttgtgcagcctggcggatcactgcggctgtcctgcgcggcatcaggcttcacgttttcttcctacgccatgtcctgggtgcgccaggcccctggaaagggactggaatgggtgtccgcgatttcggggtccggcgggagcacctactacgccgattccgtgaagggccgcttcactatctcgcgggacaactccaagaacaccctctacctccaaatgaatagcctgcgggccgaggataccgccgtctactattgcgctaaggtcgtgcgcgacggaatggacgtgtggggacagggtaccaccgtgacagtgtcctcggggggaggcggtagcggcggaggaggaagcggtggtggaggttccgagattgtgctgactcaatcacccgcgaccctgagcctgtcccccggcgaaagggccactctgtcctgtcgggccagccaatcagtctcctcctcgtacctggcctggtaccagcagaagccaggacaggctccgagactccttatctatggcgcatcctcccgcgccaccggaatcccggataggttctcgggaaacggatcggggaccgacttcactctcaccatctcccggctggaaccggaggacttcgccgtgtactactgccagcagtacggcagcccgcctagattcactttcggccccggcaccaaagtggacatcaag

SEQ ID NO: 1577 - protein, 117 aa, synthetic construct
  REGION 1..117: note = source = /note="Description of Artificial Sequence: Synthetic polypeptide"
EVQLVESGGGLVQPGGSLRLSCAASGFTFSSYAMSWVRQAPGKGLEWVSAISGSGGSTYYADSVKGRFTISRDNSKNTLYLQMNSLRAEDTAVYYCAKVVRDGMDVWGQGTTVTVSS

SEQ ID NO: 1578 - protein, 109 aa, synthetic construct
  REGION 1..109: note = source = /note="Description of Artificial Sequence: Synthetic polypeptide"
EIVLTQSPATLSLSPGERATLSCRASQSVSSSYLAWYQQKPGQAPRLLIYGASSRATGIPDRFSGNGSGTDFTLTISRLEPEDFAVYYCQQYGSPPRFTFGPGTKVDIK

SEQ ID NO: 1579 - protein, 485 aa, synthetic construct
  REGION 1..485: note = source = /note="Description of Artificial Sequence: Synthetic polypeptide"
MALPVTALLLPLALLLHAARPEVQLVESGGGLVQPGGSLRLSCAASGFTFSSYAMSWVRQAPGKGLEWVSAISGSGGSTYYADSVKGRFTISRDNSKNTLYLQMNSLRAEDTAVYYCAKVVRDGMDVWGQGTTVTVSSGGGGSGGGGSGGGGSEIVLTQSPATLSLSPGERATLSCRASQSVSSSYLAWYQQKPGQAPRLLIYGASSRATGIPDRFSGNGSGTDFTLTISRLEPEDFAVYYCQQYGSPPRFTFGPGTKVDIKTTTPAPRPPTPAPTIASQPLSLRPEACRPAAGGAVHTRGLDFACDIYIWAPLAGTCGVLLLSLVITLYCKRGRKKLLYIFKQPFMRPVQTTQEEDGCSCRFPEEEEGGCELRVKFSRSADAPAYKQGQNQLYNELNLGRREEYDVLDKRRGRDPEMGGKPRRKNPQEGLYNELQKDKMAEAYSEIGMKGERRRGKGHDGLYQGLSTATKDTYDALHMQALPPR

SEQ ID NO: 1580 - DNA, 1455 bp, synthetic construct
  misc_feature 1..1455: note = source = /note="Description of Artificial Sequence: Synthetic polynucleotide"
  source 1..1455: mol_type = other DNA
atggccctccctgtcaccgccctgctgcttccgctggctcttctgctccacgccgctcggcccgaggtgcagttggtcgaaagcgggggcgggcttgtgcagcctggcggatcactgcggctgtcctgcgcggcatcaggcttcacgttttcttcctacgccatgtcctgggtgcgccaggcccctggaaagggactggaatgggtgtccgcgatttcggggtccggcgggagcacctactacgccgattccgtgaagggccgcttcactatctcgcgggacaactccaagaacaccctctacctccaaatgaatagcctgcgggccgaggataccgccgtctactattgcgctaaggtcgtgcgcgacggaatggacgtgtggggacagggtaccaccgtgacagtgtcctcggggggaggcggtagcggcggaggaggaagcggtggtggaggttccgagattgtgctgactcaatcacccgcgaccctgagcctgtcccccggcgaaagggccactctgtcctgtcgggccagccaatcagtctcctcctcgtacctggcctggtaccagcagaagccaggacaggctccgagactccttatctatggcgcatcctcccgcgccaccggaatcccggataggttctcgggaaacggatcggggaccgacttcactctcaccatctcccggctggaaccggaggacttcgccgtgtactactgccagcagtacggcagcccgcctagattcactttcggccccggcaccaaagtggacatcaagaccactaccccagcaccgaggccacccaccccggctcctaccatcgcctcccagcctctgtccctgcgtccggaggcatgtagacccgcagctggtggggccgtgcatacccggggtcttgacttcgcctgcgatatctacatttgggcccctctggctggtacttgcggggtcctgctgctttcactcgtgatcactctttactgtaagcgcggtcggaagaagctgctgtacatctttaagcaacccttcatgaggcctgtgcagactactcaagaggaggacggctgttcatgccggttcccagaggaggaggaaggcggctgcgaactgcgcgtgaaattcagccgcagcgcagatgctccagcctacaagcaggggcagaaccagctctacaacgaactcaatcttggtcggagagaggagtacgacgtgctggacaagcggagaggacgggacccagaaatgggcgggaagccgcgcagaaagaatccccaagagggcctgtacaacgagctccaaaaggataagatggcagaagcctatagcgagattggtatgaaaggggaacgcagaagaggcaaaggccacgacggactgtaccagggactcagcaccgccaccaaggacacctatgacgctcttcacatgcaggccctgccgcctcgg

SEQ ID NO: 1581 - protein, 242 aa, synthetic construct
  REGION 1..242: note = source = /note="Description of Artificial Sequence: Synthetic polypeptide"
EVQLLESGGGLVQPGGSLRLSCAASGFTFSSYAMSWVRQAPGKGLEWVSAISGSGGSTYYADSVKGRFTISRDNSKNTLYLQMNSLRAEDTAVYYCAKIPQTGTFDYWGQGTLVTVSSGGGGSGGGGSGGGGSEIVLTQSPGTLSLSPGERATLSCRASQSVSSSYLAWYQQRPGQAPRLLIYGASSRATGIPDRFSGSGSGTDFTLTISRLEPEDFAVYYCQHYGSSPSWTFGQGTRLEIK

SEQ ID NO: 1582 - DNA, 726 bp, synthetic construct
  misc_feature 1..726: note = source = /note="Description of Artificial Sequence: Synthetic polynucleotide"
  source 1..726: mol_type = other DNA
gaagtgcagctgctggagtccggcggtggattggtgcaaccggggggatcgctcagactgtcctgtgcggcgtcaggcttcaccttctcgagctacgccatgtcatgggtcagacaggcccctggaaagggtctggaatgggtgtccgccatttccgggagcgggggatctacatactacgccgatagcgtgaagggccgcttcaccatttcccgggacaactccaagaacactctctatctgcaaatgaactccctccgcgctgaggacactgccgtgtactactgcgccaaaatccctcagaccggcaccttcgactactggggacaggggactctggtcaccgtcagcagcggtggcggaggttcggggggaggaggaagcggcggcggagggtccgagattgtgctgacccagtcacccggcactttgtccctgtcgcctggagaaagggccaccctttcctgccgggcatcccaatccgtgtcctcctcgtacctggcctggtaccagcagaggcccggacaggccccacggcttctgatctacggagcaagcagccgcgcgaccggtatcccggaccggttttcgggctcgggctcaggaactgacttcaccctcaccatctcccgcctggaacccgaagatttcgctgtgtattactgccagcactacggcagctccccgtcctggacgttcggccagggaactcggctggagatcaag

SEQ ID NO: 1583 - protein, 118 aa, synthetic construct
  REGION 1..118: note = source = /note="Description of Artificial Sequence: Synthetic polypeptide"
EVQLLESGGGLVQPGGSLRLSCAASGFTFSSYAMSWVRQAPGKGLEWVSAISGSGGSTYYADSVKGRFTISRDNSKNTLYLQMNSLRAEDTAVYYCAKIPQTGTFDYWGQGTLVTVSS

SEQ ID NO: 1584 - protein, 109 aa, synthetic construct
  REGION 1..109: note = source = /note="Description of Artificial Sequence: Synthetic polypeptide"
EIVLTQSPGTLSLSPGERATLSCRASQSVSSSYLAWYQQRPGQAPRLLIYGASSRATGIPDRFSGSGSGTDFTLTISRLEPEDFAVYYCQHYGSSPSWTFGQGTRLEIK

SEQ ID NO: 1585 - protein, 486 aa, synthetic construct
  REGION 1..486: note = source = /note="Description of Artificial Sequence: Synthetic polypeptide"
MALPVTALLLPLALLLHAARPEVQLLESGGGLVQPGGSLRLSCAASGFTFSSYAMSWVRQAPGKGLEWVSAISGSGGSTYYADSVKGRFTISRDNSKNTLYLQMNSLRAEDTAVYYCAKIPQTGTFDYWGQGTLVTVSSGGGGSGGGGSGGGGSEIVLTQSPGTLSLSPGERATLSCRASQSVSSSYLAWYQQRPGQAPRLLIYGASSRATGIPDRFSGSGSGTDFTLTISRLEPEDFAVYYCQHYGSSPSWTFGQGTRLEIKTTTPAPRPPTPAPTIASQPLSLRPEACRPAAGGAVHTRGLDFACDIYIWAPLAGTCGVLLLSLVITLYCKRGRKKLLYIFKQPFMRPVQTTQEEDGCSCRFPEEEEGGCELRVKFSRSADAPAYKQGQNQLYNELNLGRREEYDVLDKRRGRDPEMGGKPRRKNPQEGLYNELQKDKMAEAYSEIGMKGERRRGKGHDGLYQGLSTATKDTYDALHMQALPPR

SEQ ID NO: 1586 - DNA, 1458 bp, synthetic construct
  misc_feature 1..1458: note = source = /note="Description of Artificial Sequence: Synthetic polynucleotide"
  source 1..1458: mol_type = other DNA
atggccctccctgtcaccgccctgctgcttccgctggctcttctgctccacgccgctcggcccgaagtgcagctgctggagtccggcggtggattggtgcaaccggggggatcgctcagactgtcctgtgcggcgtcaggcttcaccttctcgagctacgccatgtcatgggtcagacaggcccctggaaagggtctggaatgggtgtccgccatttccgggagcgggggatctacatactacgccgatagcgtgaagggccgcttcaccatttcccgggacaactccaagaacactctctatctgcaaatgaactccctccgcgctgaggacactgccgtgtactactgcgccaaaatccctcagaccggcaccttcgactactggggacaggggactctggtcaccgtcagcagcggtggcggaggttcggggggaggaggaagcggcggcggagggtccgagattgtgctgacccagtcacccggcactttgtccctgtcgcctggagaaagggccaccctttcctgccgggcatcccaatccgtgtcctcctcgtacctggcctggtaccagcagaggcccggacaggccccacggcttctgatctacggagcaagcagccgcgcgaccggtatcccggaccggttttcgggctcgggctcaggaactgacttcaccctcaccatctcccgcctggaacccgaagatttcgctgtgtattactgccagcactacggcagctccccgtcctggacgttcggccagggaactcggctggagatcaagaccactaccccagcaccgaggccacccaccccggctcctaccatcgcctcccagcctctgtccctgcgtccggaggcatgtagacccgcagctggtggggccgtgcatacccggggtcttgacttcgcctgcgatatctacatttgggcccctctggctggtacttgcggggtcctgctgctttcactcgtgatcactctttactgtaagcgcggtcggaagaagctgctgtacatctttaagcaacccttcatgaggcctgtgcagactactcaagaggaggacggctgttcatgccggttcccagaggaggaggaaggcggctgcgaactgcgcgtgaaattcagccgcagcgcagatgctccagcctacaagcaggggcagaaccagctctacaacgaactcaatcttggtcggagagaggagtacgacgtgctggacaagcggagaggacgggacccagaaatgggcgggaagccgcgcagaaagaatccccaagagggcctgtacaacgagctccaaaaggataagatggcagaagcctatagcgagattggtatgaaaggggaacgcagaagaggcaaaggccacgacggactgtaccagggactcagcaccgccaccaaggacacctatgacgctcttcacatgcaggccctgccgcctcgg

SEQ ID NO: 1587 - protein, 248 aa, synthetic construct
  REGION 1..248: note = source = /note="Description of Artificial Sequence: Synthetic polypeptide"
EVQLVETGGGLVQPGGSLRLSCAASGFTFSSYAMSWVRQAPGKGLEWVSAISGSGGSTYYADSVKGRFTMSRENDKNSVFLQMNSLRVEDTGVYYCARANYKRELRYYYGMDVWGQGTMVTVSSGGGGSGGGGSGGGGSEIVMTQSPGTLSLSPGESATLSCRASQRVASNYLAWYQHKPGQAPSLLISGASSRATGVPDRFSGSGSGTDFTLAISRLEPEDSAVYYCQHYDSSPSWTFGQGTKVEIK

SEQ ID NO: 1588 - DNA, 744 bp, synthetic construct
  misc_feature 1..744: note = source = /note="Description of Artificial Sequence: Synthetic polynucleotide"
  source 1..744: mol_type = other DNA
gaagtgcaactggtggaaaccggtggaggactcgtgcagcctggcggcagcctccggctgagctgcgccgcttcgggattcaccttttcctcctacgcgatgtcttgggtcagacaggcccccggaaaggggctggaatgggtgtcagccatctccggctccggcggatcaacgtactacgccgactccgtgaaaggccggttcaccatgtcgcgcgagaatgacaagaactccgtgttcctgcaaatgaactccctgagggtggaggacaccggagtgtactattgtgcgcgcgccaactacaagagagagctgcggtactactacggaatggacgtctggggacagggaactatggtgaccgtgtcatccggtggagggggaagcggcggtggaggcagcgggggcgggggttcagaaattgtcatgacccagtccccgggaactctttccctctcccccggggaatccgcgactttgtcctgccgggccagccagcgcgtggcctcgaactacctcgcatggtaccagcataagccaggccaagccccttccctgctgatttccggggctagcagccgcgccactggcgtgccggataggttctcgggaagcggctcgggtaccgatttcaccctggcaatctcgcggctggaaccggaggattcggccgtgtactactgccagcactatgactcatccccctcctggacattcggacagggcaccaaggtcgagatcaag

SEQ ID NO: 1589 - protein, 124 aa, synthetic construct
  REGION 1..124: note = source = /note="Description of Artificial Sequence: Synthetic polypeptide"
EVQLVETGGGLVQPGGSLRLSCAASGFTFSSYAMSWVRQAPGKGLEWVSAISGSGGSTYYADSVKGRFTMSRENDKNSVFLQMNSLRVEDTGVYYCARANYKRELRYYYGMDVWGQGTMVTVSS

SEQ ID NO: 1590 - protein, 109 aa, synthetic construct
  REGION 1..109: note = source = /note="Description of Artificial Sequence: Synthetic polypeptide"
EIVMTQSPGTLSLSPGESATLSCRASQRVASNYLAWYQHKPGQAPSLLISGASSRATGVPDRFSGSGSGTDFTLAISRLEPEDSAVYYCQHYDSSPSWTFGQGTKVEIK

SEQ ID NO: 1591 - protein, 492 aa, synthetic construct
  REGION 1..492: note = source = /note="Description of Artificial Sequence: Synthetic polypeptide"
MALPVTALLLPLALLLHAARPEVQLVETGGGLVQPGGSLRLSCAASGFTFSSYAMSWVRQAPGKGLEWVSAISGSGGSTYYADSVKGRFTMSRENDKNSVFLQMNSLRVEDTGVYYCARANYKRELRYYYGMDVWGQGTMVTVSSGGGGSGGGGSGGGGSEIVMTQSPGTLSLSPGESATLSCRASQRVASNYLAWYQHKPGQAPSLLISGASSRATGVPDRFSGSGSGTDFTLAISRLEPEDSAVYYCQHYDSSPSWTFGQGTKVEIKTTTPAPRPPTPAPTIASQPLSLRPEACRPAAGGAVHTRGLDFACDIYIWAPLAGTCGVLLLSLVITLYCKRGRKKLLYIFKQPFMRPVQTTQEEDGCSCRFPEEEEGGCELRVKFSRSADAPAYKQGQNQLYNELNLGRREEYDVLDKRRGRDPEMGGKPRRKNPQEGLYNELQKDKMAEAYSEIGMKGERRRGKGHDGLYQGLSTATKDTYDALHMQALPPR

SEQ ID NO: 1592 - DNA, 1476 bp, synthetic construct
  misc_feature 1..1476: note = source = /note="Description of Artificial Sequence: Synthetic polynucleotide"
  source 1..1476: mol_type = other DNA
atggccctccctgtcaccgccctgctgcttccgctggctcttctgctccacgccgctcggcccgaagtgcaactggtggaaaccggtggaggactcgtgcagcctggcggcagcctccggctgagctgcgccgcttcgggattcaccttttcctcctacgcgatgtcttgggtcagacaggcccccggaaaggggctggaatgggtgtcagccatctccggctccggcggatcaacgtactacgccgactccgtgaaaggccggttcaccatgtcgcgcgagaatgacaagaactccgtgttcctgcaaatgaactccctgagggtggaggacaccggagtgtactattgtgcgcgcgccaactacaagagagagctgcggtactactacggaatggacgtctggggacagggaactatggtgaccgtgtcatccggtggagggggaagcggcggtggaggcagcgggggcgggggttcagaaattgtcatgacccagtccccgggaactctttccctctcccccggggaatccgcgactttgtcctgccgggccagccagcgcgtggcctcgaactacctcgcatggtaccagcataagccaggccaagccccttccctgctgatttccggggctagcagccgcgccactggcgtgccggataggttctcgggaagcggctcgggtaccgatttcaccctggcaatctcgcggctggaaccggaggattcggccgtgtactactgccagcactatgactcatccccctcctggacattcggacagggcaccaaggtcgagatcaagaccactaccccagcaccgaggccacccaccccggctcctaccatcgcctcccagcctctgtccctgcgtccggaggcatgtagacccgcagctggtggggccgtgcatacccggggtcttgacttcgcctgcgatatctacatttgggcccctctggctggtacttgcggggtcctgctgctttcactcgtgatcactctttactgtaagcgcggtcggaagaagctgctgtacatctttaagcaacccttcatgaggcctgtgcagactactcaagaggaggacggctgttcatgccggttcccagaggaggaggaaggcggctgcgaactgcgcgtgaaattcagccgcagcgcagatgctccagcctacaagcaggggcagaaccagctctacaacgaactcaatcttggtcggagagaggagtacgacgtgctggacaagcggagaggacgggacccagaaatgggcgggaagccgcgcagaaagaatccccaagagggcctgtacaacgagctccaaaaggataagatggcagaagcctatagcgagattggtatgaaaggggaacgcagaagaggcaaaggccacgacggactgtaccagggactcagcaccgccaccaaggacacctatgacgctcttcacatgcaggccctgccgcctcgg

SEQ ID NO: 1593 - protein, 244 aa, synthetic construct
  REGION 1..244: note = source = /note="Description of Artificial Sequence: Synthetic polypeptide"
EVQLLETGGGLVQPGGSLRLSCAASGFSFSSYAMSWVRQAPGKGLEWVSAISGSGGSTYYADSVKGRFTISRDNSKNTLYLQMNSLRAEDTAVYYCAKALVGATGAFDIWGQGTLVTVSSGGGGSGGGGSGGGGSEIVLTQSPGTLSLSPGERATLSCRASQSLSSNFLAWYQQKPGQAPGLLIYGASNWATGTPDRFSGSGSGTDFTLTITRLEPEDFAVYYCQYYGTSPMYTFGQGTKVEIK

SEQ ID NO: 1594 - DNA, 732 bp, synthetic construct
  misc_feature 1..732: note = source = /note="Description of Artificial Sequence: Synthetic polynucleotide"
  source 1..732: mol_type = other DNA
gaagtgcagctgctcgaaaccggtggagggctggtgcagccagggggctccctgaggctttcatgcgccgctagcggattctccttctcctcttacgccatgtcgtgggtccgccaagcccctggaaaaggcctggaatgggtgtccgcgatttccgggagcggaggttcgacctattacgccgactccgtgaagggccgctttaccatctcccgggataactccaagaacactctgtacctccaaatgaactcgctgagagccgaggacaccgccgtgtattactgcgcgaaggcgctggtcggcgcgactggggcattcgacatctggggacagggaactcttgtgaccgtgtcgagcggaggcggcggctccggcggaggagggagcgggggcggtggttccgaaatcgtgttgactcagtccccgggaaccctgagcttgtcacccggggagcgggccactctctcctgtcgcgcctcccaatcgctctcatccaatttcctggcctggtaccagcagaagcccggacaggccccgggcctgctcatctacggcgcttcaaactgggcaacgggaacccctgatcggttcagcggaagcggatcgggtactgactttaccctgaccatcaccagactggaaccggaggacttcgccgtgtactactgccagtactacggcacctcccccatgtacacattcggacagggtaccaaggtcgagattaag

SEQ ID NO: 1595 - protein, 120 aa, synthetic construct
  REGION 1..120: note = source = /note="Description of Artificial Sequence: Synthetic polypeptide"
EVQLLETGGGLVQPGGSLRLSCAASGFSFSSYAMSWVRQAPGKGLEWVSAISGSGGSTYYADSVKGRFTISRDNSKNTLYLQMNSLRAEDTAVYYCAKALVGATGAFDIWGQGTLVTVSS

SEQ ID NO: 1596 - protein, 109 aa, synthetic construct
  REGION 1..109: note = source = /note="Description of Artificial Sequence: Synthetic polypeptide"
EIVLTQSPGTLSLSPGERATLSCRASQSLSSNFLAWYQQKPGQAPGLLIYGASNWATGTPDRFSGSGSGTDFTLTITRLEPEDFAVYYCQYYGTSPMYTFGQGTKVEIK

SEQ ID NO: 1597 - protein, 488 aa, synthetic construct
  REGION 1..488: note = source = /note="Description of Artificial Sequence: Synthetic polypeptide"
MALPVTALLLPLALLLHAARPEVQLLETGGGLVQPGGSLRLSCAASGFSFSSYAMSWVRQAPGKGLEWVSAISGSGGSTYYADSVKGRFTISRDNSKNTLYLQMNSLRAEDTAVYYCAKALVGATGAFDIWGQGTLVTVSSGGGGSGGGGSGGGGSEIVLTQSPGTLSLSPGERATLSCRASQSLSSNFLAWYQQKPGQAPGLLIYGASNWATGTPDRFSGSGSGTDFTLTITRLEPEDFAVYYCQYYGTSPMYTFGQGTKVEIKTTTPAPRPPTPAPTIASQPLSLRPEACRPAAGGAVHTRGLDFACDIYIWAPLAGTCGVLLLSLVITLYCKRGRKKLLYIFKQPFMRPVQTTQEEDGCSCRFPEEEEGGCELRVKFSRSADAPAYKQGQNQLYNELNLGRREEYDVLDKRRGRDPEMGGKPRRKNPQEGLYNELQKDKMAEAYSEIGMKGERRRGKGHDGLYQGLSTATKDTYDALHMQALPPR

SEQ ID NO: 1598 - DNA, 1464 bp, synthetic construct
  misc_feature 1..1464: note = source = /note="Description of Artificial Sequence: Synthetic polynucleotide"
  source 1..1464: mol_type = other DNA
atggccctccctgtcaccgccctgctgcttccgctggctcttctgctccacgccgctcggcccgaagtgcagctgctcgaaaccggtggagggctggtgcagccagggggctccctgaggctttcatgcgccgctagcggattctccttctcctcttacgccatgtcgtgggtccgccaagcccctggaaaaggcctggaatgggtgtccgcgatttccgggagcggaggttcgacctattacgccgactccgtgaagggccgctttaccatctcccgggataactccaagaacactctgtacctccaaatgaactcgctgagagccgaggacaccgccgtgtattactgcgcgaaggcgctggtcggcgcgactggggcattcgacatctggggacagggaactcttgtgaccgtgtcgagcggaggcggcggctccggcggaggagggagcgggggcggtggttccgaaatcgtgttgactcagtccccgggaaccctgagcttgtcacccggggagcgggccactctctcctgtcgcgcctcccaatcgctctcatccaatttcctggcctggtaccagcagaagcccggacaggccccgggcctgctcatctacggcgcttcaaactgggcaacgggaacccctgatcggttcagcggaagcggatcgggtactgactttaccctgaccatcaccagactggaaccggaggacttcgccgtgtactactgccagtactacggcacctcccccatgtacacattcggacagggtaccaaggtcgagattaagaccactaccccagcaccgaggccacccaccccggctcctaccatcgcctcccagcctctgtccctgcgtccggaggcatgtagacccgcagctggtggggccgtgcatacccggggtcttgacttcgcctgcgatatctacatttgggcccctctggctggtacttgcggggtcctgctgctttcactcgtgatcactctttactgtaagcgcggtcggaagaagctgctgtacatctttaagcaacccttcatgaggcctgtgcagactactcaagaggaggacggctgttcatgccggttcccagaggaggaggaaggcggctgcgaactgcgcgtgaaattcagccgcagcgcagatgctccagcctacaagcaggggcagaaccagctctacaacgaactcaatcttggtcggagagaggagtacgacgtgctggacaagcggagaggacgggacccagaaatgggcgggaagccgcgcagaaagaatccccaagagggcctgtacaacgagctccaaaaggataagatggcagaagcctatagcgagattggtatgaaaggggaacgcagaagaggcaaaggccacgacggactgtaccagggactcagcaccgccaccaaggacacctatgacgctcttcacatgcaggccctgccgcctcgg

SEQ ID NO: 1599 - protein, 244 aa, synthetic construct
  REGION 1..244: note = source = /note="Description of Artificial Sequence: Synthetic polypeptide"
EVQLLESGGGLVQPGGSLRLSCAASGFTFSSYAMSWVRQAPGKGLEWVSAISGSGGSTYYADSVKGRFTISRDNSKNTLYLQMNSLRAEDTAVYYCVLWFGEGFDPWGQGTLVTVSSGGGGSGGGGSGGGGSDIVLTQSPLSLPVTPGEPASISCRSSQSLLHSNGYNYLDWYLQKPGQSPQLLIYLGSNRASGVPDRFSGSGSGTDFTLKISRVEAEDVGVYYCMQALQTPLTFGGGTKVDIK

SEQ ID NO: 1600 - DNA, 733 bp, synthetic construct
  misc_feature 1..733: note = source = /note="Description of Artificial Sequence: Synthetic polynucleotide"
  source 1..733: mol_type = other DNA
gaagtgcagctgcttgagagcggtggaggtctggtgcagcccgggggatcactgcgcctgtcctgtgccgcgtccggtttcactttctcctcgtacgccatgtcgtgggtcagacaggcaccgggaaagggactggaatgggtgtcagccatttcgggttcggggggcagcacctactacgctgactccgtgaagggccggttcaccatttcccgcgacaactccaagaacaccttgtacctccaaatgaactccctgcgggccgaagataccgccgtgtattactgcgtgctgtggttcggagagggattcgacccgtggggacaaggaacactcgtgactgtgtcatccggcggaggcggcagcggtggcggcggttccggcggcggcggatctgacatcgtgttgacccagtcccctctgagcctgccggtcactcctggcgaaccagccagcatctcctgccggtcgagccagtccctcctgcactccaatgggtacaactacctcgattggtatctgcaaaagccgggccagagcccccagctgctgatctaccttgggtcaaaccgcgcttccggggtgcctgatagattctccgggtccgggagcggaaccgactttaccctgaaaatctcgagggtggaggccgaggacgtcggagtgtactactgcatgcaggcgctccagactcccctgaccttcggaggaggaacgaaggtcgacatcaaga

SEQ ID NO: 1601 - protein, 117 aa, synthetic construct
  REGION 1..117: note = source = /note="Description of Artificial Sequence: Synthetic polypeptide"
EVQLLESGGGLVQPGGSLRLSCAASGFTFSSYAMSWVRQAPGKGLEWVSAISGSGGSTYYADSVKGRFTISRDNSKNTLYLQMNSLRAEDTAVYYCVLWFGEGFDPWGQGTLVTVSS

SEQ ID NO: 1602 - protein, 112 aa, synthetic construct
  REGION 1..112: note = source = /note="Description of Artificial Sequence: Synthetic polypeptide"
DIVLTQSPLSLPVTPGEPASISCRSSQSLLHSNGYNYLDWYLQKPGQSPQLLIYLGSNRASGVPDRFSGSGSGTDFTLKISRVEAEDVGVYYCMQALQTPLTFGGGTKVDIK

SEQ ID NO: 1603 - protein, 488 aa, synthetic construct
  REGION 1..488: note = source = /note="Description of Artificial Sequence: Synthetic polypeptide"
MALPVTALLLPLALLLHAARPEVQLLESGGGLVQPGGSLRLSCAASGFTFSSYAMSWVRQAPGKGLEWVSAISGSGGSTYYADSVKGRFTISRDNSKNTLYLQMNSLRAEDTAVYYCVLWFGEGFDPWGQGTLVTVSSGGGGSGGGGSGGGGSDIVLTQSPLSLPVTPGEPASISCRSSQSLLHSNGYNYLDWYLQKPGQSPQLLIYLGSNRASGVPDRFSGSGSGTDFTLKISRVEAEDVGVYYCMQALQTPLTFGGGTKVDIKTTTPAPRPPTPAPTIASQPLSLRPEACRPAAGGAVHTRGLDFACDIYIWAPLAGTCGVLLLSLVITLYCKRGRKKLLYIFKQPFMRPVQTTQEEDGCSCRFPEEEEGGCELRVKFSRSADAPAYKQGQNQLYNELNLGRREEYDVLDKRRGRDPEMGGKPRRKNPQEGLYNELQKDKMAEAYSEIGMKGERRRGKGHDGLYQGLSTATKDTYDALHMQALPPR

SEQ ID NO: 1604 - DNA, 1464 bp, synthetic construct
  misc_feature 1..1464: note = source = /note="Description of Artificial Sequence: Synthetic polynucleotide"
  source 1..1464: mol_type = other DNA
atggccctccctgtcaccgccctgctgcttccgctggctcttctgctccacgccgctcggcccgaagtgcagctgcttgagagcggtggaggtctggtgcagcccgggggatcactgcgcctgtcctgtgccgcgtccggtttcactttctcctcgtacgccatgtcgtgggtcagacaggcaccgggaaagggactggaatgggtgtcagccatttcgggttcggggggcagcacctactacgctgactccgtgaagggccggttcaccatttcccgcgacaactccaagaacaccttgtacctccaaatgaactccctgcgggccgaagataccgccgtgtattactgcgtgctgtggttcggagagggattcgacccgtggggacaaggaacactcgtgactgtgtcatccggcggaggcggcagcggtggcggcggttccggcggcggcggatctgacatcgtgttgacccagtcccctctgagcctgccggtcactcctggcgaaccagccagcatctcctgccggtcgagccagtccctcctgcactccaatgggtacaactacctcgattggtatctgcaaaagccgggccagagcccccagctgctgatctaccttgggtcaaaccgcgcttccggggtgcctgatagattctccgggtccgggagcggaaccgactttaccctgaaaatctcgagggtggaggccgaggacgtcggagtgtactactgcatgcaggcgctccagactcccctgaccttcggaggaggaacgaaggtcgacatcaagaccactaccccagcaccgaggccacccaccccggctcctaccatcgcctcccagcctctgtccctgcgtccggaggcatgtagacccgcagctggtggggccgtgcatacccggggtcttgacttcgcctgcgatatctacatttgggcccctctggctggtacttgcggggtcctgctgctttcactcgtgatcactctttactgtaagcgcggtcggaagaagctgctgtacatctttaagcaacccttcatgaggcctgtgcagactactcaagaggaggacggctgttcatgccggttcccagaggaggaggaaggcggctgcgaactgcgcgtgaaattcagccgcagcgcagatgctccagcctacaagcaggggcagaaccagctctacaacgaactcaatcttggtcggagagaggagtacgacgtgctggacaagcggagaggacgggacccagaaatgggcgggaagccgcgcagaaagaatccccaagagggcctgtacaacgagctccaaaaggataagatggcagaagcctatagcgagattggtatgaaaggggaacgcagaagaggcaaaggccacgacggactgtaccagggactcagcaccgccaccaaggacacctatgacgctcttcacatgcaggccctgccgcctcgg

SEQ ID NO: 1605 - protein, 251 aa, synthetic construct
  REGION 1..251: note = source = /note="Description of Artificial Sequence: Synthetic polypeptide"
QVQLVESGGGLVQPGGSLRLSCAASGFTFSSYAMSWVRQAPGKGLEWVSAISGSGGSTYYADSVKGRFTISRDNSKNTLYLQMNSLRAEDTAVYYCAKVGYDSSGYYRDYYGMDVWGQGTTVTVSSGGGGSGGGGSGGGGSEIVLTQSPGTLSLSPGERATLSCRASQSVSSSYLAWYQQKPGQAPRLLIYGTSSRATGISDRFSGSGSGTDFTLTISRLEPEDFAVYYCQHYGNSPPKFTFGPGTKLEIK

SEQ ID NO: 1606 - DNA, 753 bp, synthetic construct
  misc_feature 1..753: note = source = /note="Description of Artificial Sequence: Synthetic polynucleotide"
  source 1..753: mol_type = other DNA
caagtgcagctcgtggagtcaggcggaggactggtgcagcccgggggctccctgagactttcctgcgcggcatcgggttttaccttctcctcctatgctatgtcctgggtgcgccaggccccgggaaagggactggaatgggtgtccgcaatcagcggtagcgggggctcaacatactacgccgactccgtcaagggtcgcttcactatttcccgggacaactccaagaataccctgtacctccaaatgaacagcctcagggccgaggatactgccgtgtactactgcgccaaagtcggatacgatagctccggttactaccgggactactacggaatggacgtgtggggacagggcaccaccgtgaccgtgtcaagcggcggaggcggttcaggagggggaggctccggcggtggagggtccgaaatcgtcctgactcagtcgcctggcactctgtcgttgtccccgggggagcgcgctaccctgtcgtgtcgggcgtcgcagtccgtgtcgagctcctacctcgcgtggtaccagcagaagcccggacaggcccctagacttctgatctacggcacttcttcacgcgccaccgggatcagcgacaggttcagcggctccggctccgggaccgacttcaccctgaccattagccggctggagcctgaagatttcgccgtgtattactgccaacactacggaaactcgccgccaaagttcacgttcggacccggaaccaagctggaaatcaag

SEQ ID NO: 1607 - protein, 126 aa, synthetic construct
  REGION 1..126: note = source = /note="Description of Artificial Sequence: Synthetic polypeptide"
QVQLVESGGGLVQPGGSLRLSCAASGFTFSSYAMSWVRQAPGKGLEWVSAISGSGGSTYYADSVKGRFTISRDNSKNTLYLQMNSLRAEDTAVYYCAKVGYDSSGYYRDYYGMDVWGQGTTVTVSS

SEQ ID NO: 1608 - protein, 110 aa, synthetic construct
  REGION 1..110: note = source = /note="Description of Artificial Sequence: Synthetic polypeptide"
EIVLTQSPGTLSLSPGERATLSCRASQSVSSSYLAWYQQKPGQAPRLLIYGTSSRATGISDRFSGSGSGTDFTLTISRLEPEDFAVYYCQHYGNSPPKFTFGPGTKLEIK

SEQ ID NO: 1609 - protein, 495 aa, synthetic construct
  REGION 1..495: note = source = /note="Description of Artificial Sequence: Synthetic polypeptide"
MALPVTALLLPLALLLHAARPQVQLVESGGGLVQPGGSLRLSCAASGFTFSSYAMSWVRQAPGKGLEWVSAISGSGGSTYYADSVKGRFTISRDNSKNTLYLQMNSLRAEDTAVYYCAKVGYDSSGYYRDYYGMDVWGQGTTVTVSSGGGGSGGGGSGGGGSEIVLTQSPGTLSLSPGERATLSCRASQSVSSSYLAWYQQKPGQAPRLLIYGTSSRATGISDRFSGSGSGTDFTLTISRLEPEDFAVYYCQHYGNSPPKFTFGPGTKLEIKTTTPAPRPPTPAPTIASQPLSLRPEACRPAAGGAVHTRGLDFACDIYIWAPLAGTCGVLLLSLVITLYCKRGRKKLLYIFKQPFMRPVQTTQEEDGCSCRFPEEEEGGCELRVKFSRSADAPAYKQGQNQLYNELNLGRREEYDVLDKRRGRDPEMGGKPRRKNPQEGLYNELQKDKMAEAYSEIGMKGERRRGKGHDGLYQGLSTATKDTYDALHMQALPPR

SEQ ID NO: 1610 - DNA, 1485 bp, synthetic construct
  misc_feature 1..1485: note = source = /note="Description of Artificial Sequence: Synthetic polynucleotide"
  source 1..1485: mol_type = other DNA
atggccctccctgtcaccgccctgctgcttccgctggctcttctgctccacgccgctcggccccaagtgcagctcgtggagtcaggcggaggactggtgcagcccgggggctccctgagactttcctgcgcggcatcgggttttaccttctcctcctatgctatgtcctgggtgcgccaggccccgggaaagggactggaatgggtgtccgcaatcagcggtagcgggggctcaacatactacgccgactccgtcaagggtcgcttcactatttcccgggacaactccaagaataccctgtacctccaaatgaacagcctcagggccgaggatactgccgtgtactactgcgccaaagtcggatacgatagctccggttactaccgggactactacggaatggacgtgtggggacagggcaccaccgtgaccgtgtcaagcggcggaggcggttcaggagggggaggctccggcggtggagggtccgaaatcgtcctgactcagtcgcctggcactctgtcgttgtccccgggggagcgcgctaccctgtcgtgtcgggcgtcgcagtccgtgtcgagctcctacctcgcgtggtaccagcagaagcccggacaggcccctagacttctgatctacggcacttcttcacgcgccaccgggatcagcgacaggttcagcggctccggctccgggaccgacttcaccctgaccattagccggctggagcctgaagatttcgccgtgtattactgccaacactacggaaactcgccgccaaagttcacgttcggacccggaaccaagctggaaatcaagaccactaccccagcaccgaggccacccaccccggctcctaccatcgcctcccagcctctgtccctgcgtccggaggcatgtagacccgcagctggtggggccgtgcatacccggggtcttgacttcgcctgcgatatctacatttgggcccctctggctggtacttgcggggtcctgctgctttcactcgtgatcactctttactgtaagcgcggtcggaagaagctgctgtacatctttaagcaacccttcatgaggcctgtgcagactactcaagaggaggacggctgttcatgccggttcccagaggaggaggaaggcggctgcgaactgcgcgtgaaattcagccgcagcgcagatgctccagcctacaagcaggggcagaaccagctctacaacgaactcaatcttggtcggagagaggagtacgacgtgctggacaagcggagaggacgggacccagaaatgggcgggaagccgcgcagaaagaatccccaagagggcctgtacaacgagctccaaaaggataagatggcagaagcctatagcgagattggtatgaaaggggaacgcagaagaggcaaaggccacgacggactgtaccagggactcagcaccgccaccaaggacacctatgacgctcttcacatgcaggccctgccgcctcgg

SEQ ID NO: 1611 - protein, 246 aa, synthetic construct
  REGION 1..246: note = source = /note="Description of Artificial Sequence: Synthetic polypeptide"
EVQLVESGGGLVQPGGSLRLSCAASGFTFSSYAMSWVRQAPGKGLEWVSAISGSGGSTYYADSVKGRFTISRDNSKNTLYLQMNSLRAEDTAVYYCAKMGWSSGYLGAFDIWGQGTTVTVSSGGGGSGGGGSGGGGSEIVLTQSPGTLSLSPGERATLSCRASQSVASSFLAWYQQKPGQAPRLLIYGASGRATGIPDRFSGSGSGTDFTLTISRLEPEDFAVYYCQHYGGSPRLTFGGGTKVDIK

SEQ ID NO: 1612 - DNA, 739 bp, synthetic construct
  misc_feature 1..739: note = source = /note="Description of Artificial Sequence: Synthetic polynucleotide"
  source 1..739: mol_type = other DNA
gaagtccaactggtggagtccgggggagggctcgtgcagcccggaggcagccttcggctgtcgtgcgccgcctccgggttcacgttctcatcctacgcgatgtcgtgggtcagacaggcaccaggaaagggactggaatgggtgtccgccattagcggctccggcggtagcacctactatgccgactcagtgaagggaaggttcactatctcccgcgacaacagcaagaacaccctgtacctccaaatgaactctctgcgggccgaggataccgcggtgtactattgcgccaagatgggttggtccagcggatacttgggagccttcgacatttggggacagggcactactgtgaccgtgtcctccgggggtggcggatcgggaggcggcggctcgggtggagggggttccgaaatcgtgttgacccagtcaccgggaaccctctcgctgtccccgggagaacgggctacactgtcatgtagagcgtcccagtccgtggcttcctcgttcctggcctggtaccagcagaagccgggacaggcaccccgcctgctcatctacggagccagcggccgggcgaccggcatccctgaccgcttctccggttccggctcgggcaccgactttactctgaccattagcaggcttgagcccgaggattttgccgtgtactactgccaacactacggggggagccctcgcctgaccttcggaggcggaactaaggtcgatatcaaaa

SEQ ID NO: 1613 - protein, 122 aa, synthetic construct
  REGION 1..122: note = source = /note="Description of Artificial Sequence: Synthetic polypeptide"
EVQLVESGGGLVQPGGSLRLSCAASGFTFSSYAMSWVRQAPGKGLEWVSAISGSGGSTYYADSVKGRFTISRDNSKNTLYLQMNSLRAEDTAVYYCAKMGWSSGYLGAFDIWGQGTTVTVSS

SEQ ID NO: 1614 - protein, 109 aa, synthetic construct
  REGION 1..109: note = source = /note="Description of Artificial Sequence: Synthetic polypeptide"
EIVLTQSPGTLSLSPGERATLSCRASQSVASSFLAWYQQKPGQAPRLLIYGASGRATGIPDRFSGSGSGTDFTLTISRLEPEDFAVYYCQHYGGSPRLTFGGGTKVDIK

SEQ ID NO: 1615 - protein, 490 aa, synthetic construct
  REGION 1..490: note = source = /note="Description of Artificial Sequence: Synthetic polypeptide"
MALPVTALLLPLALLLHAARPEVQLVESGGGLVQPGGSLRLSCAASGFTFSSYAMSWVRQAPGKGLEWVSAISGSGGSTYYADSVKGRFTISRDNSKNTLYLQMNSLRAEDTAVYYCAKMGWSSGYLGAFDIWGQGTTVTVSSGGGGSGGGGSGGGGSEIVLTQSPGTLSLSPGERATLSCRASQSVASSFLAWYQQKPGQAPRLLIYGASGRATGIPDRFSGSGSGTDFTLTISRLEPEDFAVYYCQHYGGSPRLTFGGGTKVDIKTTTPAPRPPTPAPTIASQPLSLRPEACRPAAGGAVHTRGLDFACDIYIWAPLAGTCGVLLLSLVITLYCKRGRKKLLYIFKQPFMRPVQTTQEEDGCSCRFPEEEEGGCELRVKFSRSADAPAYKQGQNQLYNELNLGRREEYDVLDKRRGRDPEMGGKPRRKNPQEGLYNELQKDKMAEAYSEIGMKGERRRGKGHDGLYQGLSTATKDTYDALHMQALPPR

SEQ ID NO: 1616 - DNA, 1470 bp, synthetic construct
  misc_feature 1..1470: note = source = /note="Description of Artificial Sequence: Synthetic polynucleotide"
  source 1..1470: mol_type = other DNA
atggccctccctgtcaccgccctgctgcttccgctggctcttctgctccacgccgctcggcccgaagtccaactggtggagtccgggggagggctcgtgcagcccggaggcagccttcggctgtcgtgcgccgcctccgggttcacgttctcatcctacgcgatgtcgtgggtcagacaggcaccaggaaagggactggaatgggtgtccgccattagcggctccggcggtagcacctactatgccgactcagtgaagggaaggttcactatctcccgcgacaacagcaagaacaccctgtacctccaaatgaactctctgcgggccgaggataccgcggtgtactattgcgccaagatgggttggtccagcggatacttgggagccttcgacatttggggacagggcactactgtgaccgtgtcctccgggggtggcggatcgggaggcggcggctcgggtggagggggttccgaaatcgtgttgacccagtcaccgggaaccctctcgctgtccccgggagaacgggctacactgtcatgtagagcgtcccagtccgtggcttcctcgttcctggcctggtaccagcagaagccgggacaggcaccccgcctgctcatctacggagccagcggccgggcgaccggcatccctgaccgcttctccggttccggctcgggcaccgactttactctgaccattagcaggcttgagcccgaggattttgccgtgtactactgccaacactacggggggagccctcgcctgaccttcggaggcggaactaaggtcgatatcaaaaccactaccccagcaccgaggccacccaccccggctcctaccatcgcctcccagcctctgtccctgcgtccggaggcatgtagacccgcagctggtggggccgtgcatacccggggtcttgacttcgcctgcgatatctacatttgggcccctctggctggtacttgcggggtcctgctgctttcactcgtgatcactctttactgtaagcgcggtcggaagaagctgctgtacatctttaagcaacccttcatgaggcctgtgcagactactcaagaggaggacggctgttcatgccggttcccagaggaggaggaaggcggctgcgaactgcgcgtgaaattcagccgcagcgcagatgctccagcctacaagcaggggcagaaccagctctacaacgaactcaatcttggtcggagagaggagtacgacgtgctggacaagcggagaggacgggacccagaaatgggcgggaagccgcgcagaaagaatccccaagagggcctgtacaacgagctccaaaaggataagatggcagaagcctatagcgagattggtatgaaaggggaacgcagaagaggcaaaggccacgacggactgtaccagggactcagcaccgccaccaaggacacctatgacgctcttcacatgcaggccctgccgcctcgg

SEQ ID NO: 1617 - protein, 122 aa, synthetic construct
  REGION 1..122: note = source = /note="Description of Artificial Sequence: Synthetic polypeptide"
QIQLVQSGPDLKKPGETVKLSCKASGYTFTNFGMNWVKQAPGKGFKWMAWINTYTGESYFADDFKGRFAFSVETSATTAYLQINNLKTEDTATYFCARGEIYYGYDGGFAYWGQGTLVTVSA

SEQ ID NO: 1618 - protein, 107 aa, synthetic construct
  REGION 1..107: note = source = /note="Description of Artificial Sequence: Synthetic polypeptide"
DVVMTQSHRFMSTSVGDRVSITCRASQDVNTAVSWYQQKPGQSPKLLIFSASYRYTGVPDRFTGSGSGADFTLTISSVQAEDLAVYYCQQHYSTPWTFGGGTKLDIK

SEQ ID NO: 1619 - protein, 244 aa, synthetic construct
  REGION 1..244: note = source = /note="Description of Artificial Sequence: Synthetic polypeptide"
QIQLVQSGPDLKKPGETVKLSCKASGYTFTNFGMNWVKQAPGKGFKWMAWINTYTGESYFADDFKGRFAFSVETSATTAYLQINNLKTEDTATYFCARGEIYYGYDGGFAYWGQGTLVTVSAGGGGSGGGGSGGGGSDVVMTQSHRFMSTSVGDRVSITCRASQDVNTAVSWYQQKPGQSPKLLIFSASYRYTGVPDRFTGSGSGADFTLTISSVQAEDLAVYYCQQHYSTPWTFGGGTKLDIK

SEQ ID NO: 1620 - protein, 467 aa, synthetic construct
  REGION 1..467: note = source = /note="Description of Artificial Sequence: Synthetic polypeptide"
QIQLVQSGPDLKKPGETVKLSCKASGYTFTNFGMNWVKQAPGKGFKWMAWINTYTGESYFADDFKGRFAFSVETSATTAYLQINNLKTEDTATYFCARGEIYYGYDGGFAYWGQGTLVTVSAGGGGSGGGGSGGGGSDVVMTQSHRFMSTSVGDRVSITCRASQDVNTAVSWYQQKPGQSPKLLIFSASYRYTGVPDRFTGSGSGADFTLTISSVQAEDLAVYYCQQHYSTPWTFGGGTKLDIKTTTPAPRPPTPAPTIASQPLSLRPEACRPAAGGAVHTRGLDFACDIYIWAPLAGTCGVLLLSLVITLYCKRGRKKLLYIFKQPFMRPVQTTQEEDGCSCRFPEEEEGGCELRVKFSRSADAPAYKQGQNQLYNELNLGRREEYDVLDKRRGRDPEMGGKPRRKNPQEGLYNELQKDKMAEAYSEIGMKGERRRGKGHDGLYQGLSTATKDTYDALHMQALPPR

SEQ ID NO: 1621 - protein, 117 aa, synthetic construct
  REGION 1..117: note = source = /note="Description of Artificial Sequence: Synthetic polypeptide"
QIQLVQSGPELKKPGETVKISCKASGYTFTDYSINWVKRAPGKGLKWMGWINTETREPAYAYDFRGRFAFSLETSASTAYLQINNLKYEDTATYFCALDYSYAMDYWGQGTSVTVSS

SEQ ID NO: 1622 - protein, 111 aa, synthetic construct
  REGION 1..111: note = source = /note="Description of Artificial Sequence: Synthetic polypeptide"
DIVLTQSPASLAMSLGKRATISCRASESVSVIGAHLIHWYQQKPGQPPKLLIYLASNLETGVPARFSGSGSGTDFTLTIDPVEEDDVAIYSCLQSRIFPRTFGGGTKLEIK

SEQ ID NO: 1623 - protein, 249 aa, synthetic construct
  REGION 1..249: note = source = /note="Description of Artificial Sequence: Synthetic polypeptide"
QIQLVQSGPELKKPGETVKISCKASGYTFTDYSINWVKRAPGKGLKWMGWINTETREPAYAYDFRGRFAFSLETSASTAYLQINNLKYEDTATYFCALDYSYAMDYWGQGTSVTVSSGGGGSGGGGSGGGGSQIQLVQSGPELKKPGETVKISCKASGYTFTDYSINWVKRAPGKGLKWMGWINTETREPAYAYDFRGRFAFSLETSASTAYLQINNLKYEDTATYFCALDYSYAMDYWGQGTSVTVSS

SEQ ID NO: 1624 - protein, 472 aa, synthetic construct
  REGION 1..472: note = source = /note="Description of Artificial Sequence: Synthetic polypeptide"
QIQLVQSGPELKKPGETVKISCKASGYTFTDYSINWVKRAPGKGLKWMGWINTETREPAYAYDFRGRFAFSLETSASTAYLQINNLKYEDTATYFCALDYSYAMDYWGQGTSVTVSSGGGGSGGGGSGGGGSQIQLVQSGPELKKPGETVKISCKASGYTFTDYSINWVKRAPGKGLKWMGWINTETREPAYAYDFRGRFAFSLETSASTAYLQINNLKYEDTATYFCALDYSYAMDYWGQGTSVTVSSTTTPAPRPPTPAPTIASQPLSLRPEACRPAAGGAVHTRGLDFACDIYIWAPLAGTCGVLLLSLVITLYCKRGRKKLLYIFKQPFMRPVQTTQEEDGCSCRFPEEEEGGCELRVKFSRSADAPAYKQGQNQLYNELNLGRREEYDVLDKRRGRDPEMGGKPRRKNPQEGLYNELQKDKMAEAYSEIGMKGERRRGKGHDGLYQGLSTATKDTYDALHMQALPPR

SEQ ID NO: 1625 - protein, 117 aa, synthetic construct
  REGION 1..117: note = source = /note="Description of Artificial Sequence: Synthetic polypeptide"
QIQLVQSGPELKKPGETVKISCKASGYTFRHYSMNWVKQAPGKGLKWMGRINTESGVPIYADDFKGRFAFSVETSASTAYLVINNLKDEDTASYFCSNDYLYSLDFWGQGTALTVSS

SEQ ID NO: 1626 - protein, 111 aa, synthetic construct
  REGION 1..111: note = source = /note="Description of Artificial Sequence: Synthetic polypeptide"
DIVLTQSPPSLAMSLGKRATISCRASESVTILGSHLIYWYQQKPGQPPTLLIQLASNVQTGVPARFSGSGSRTDFTLTIDPVEEDDVAVYYCLQSRTIPRTFGGGTKLEIK

SEQ ID NO: 1627 - protein, 243 aa, synthetic construct
  REGION 1..243: note = source = /note="Description of Artificial Sequence: Synthetic polypeptide"
QIQLVQSGPELKKPGETVKISCKASGYTFRHYSMNWVKQAPGKGLKWMGRINTESGVPIYADDFKGRFAFSVETSASTAYLVINNLKDEDTASYFCSNDYLYSLDFWGQGTALTVSSGGGGSGGGGSGGGGSDIVLTQSPPSLAMSLGKRATISCRASESVTILGSHLIYWYQQKPGQPPTLLIQLASNVQTGVPARFSGSGSRTDFTLTIDPVEEDDVAVYYCLQSRTIPRTFGGGTKLEIK

SEQ ID NO: 1628 - protein, 466 aa, synthetic construct
  REGION 1..466: note = source = /note="Description of Artificial Sequence: Synthetic polypeptide"
QIQLVQSGPELKKPGETVKISCKASGYTFRHYSMNWVKQAPGKGLKWMGRINTESGVPIYADDFKGRFAFSVETSASTAYLVINNLKDEDTASYFCSNDYLYSLDFWGQGTALTVSSGGGGSGGGGSGGGGSDIVLTQSPPSLAMSLGKRATISCRASESVTILGSHLIYWYQQKPGQPPTLLIQLASNVQTGVPARFSGSGSRTDFTLTIDPVEEDDVAVYYCLQSRTIPRTFGGGTKLEIKTTTPAPRPPTPAPTIASQPLSLRPEACRPAAGGAVHTRGLDFACDIYIWAPLAGTCGVLLLSLVITLYCKRGRKKLLYIFKQPFMRPVQTTQEEDGCSCRFPEEEEGGCELRVKFSRSADAPAYKQGQNQLYNELNLGRREEYDVLDKRRGRDPEMGGKPRRKNPQEGLYNELQKDKMAEAYSEIGMKGERRRGKGHDGLYQGLSTATKDTYDALHMQALPPR

SEQ ID NO: 1629 - protein, 117 aa, synthetic construct
  REGION 1..117: note = source = /note="Description of Artificial Sequence: Synthetic polypeptide"
QIQLVQSGPELKKPGETVKISCKASGYTFTHYSMNWVKQAPGKGLKWMGRINTETGEPLYADDFKGRFAFSLETSASTAYLVINNLKNEDTATFFCSNDYLYSCDYWGQGTTLTVSS

SEQ ID NO: 1630 - protein, 111 aa, synthetic construct; identical to SEQ ID NO: 1626
  REGION 1..111: note = source = /note="Description of Artificial Sequence: Synthetic polypeptide"

SEQ ID NO: 1631 - protein, 243 aa, synthetic construct
  REGION 1..243: note = source = /note="Description of Artificial Sequence: Synthetic polypeptide"
QIQLVQSGPELKKPGETVKISCKASGYTFTHYSMNWVKQAPGKGLKWMGRINTETGEPLYADDFKGRFAFSLETSASTAYLVINNLKNEDTATFFCSNDYLYSCDYWGQGTTLTVSSGGGGSGGGGSGGGGSDIVLTQSPPSLAMSLGKRATISCRASESVTILGSHLIYWYQQKPGQPPTLLIQLASNVQTGVPARFSGSGSRTDFTLTIDPVEEDDVAVYYCLQSRTIPRTFGGGTKLEIK

SEQ ID NO: 1632 - protein, 466 aa, synthetic construct
  REGION 1..466: note = source = /note="Description of Artificial Sequence: Synthetic polypeptide"
QIQLVQSGPELKKPGETVKISCKASGYTFTHYSMNWVKQAPGKGLKWMGRINTETGEPLYADDFKGRFAFSLETSASTAYLVINNLKNEDTATFFCSNDYLYSCDYWGQGTTLTVSSGGGGSGGGGSGGGGSDIVLTQSPPSLAMSLGKRATISCRASESVTILGSHLIYWYQQKPGQPPTLLIQLASNVQTGVPARFSGSGSRTDFTLTIDPVEEDDVAVYYCLQSRTIPRTFGGGTKLEIKTTTPAPRPPTPAPTIASQPLSLRPEACRPAAGGAVHTRGLDFACDIYIWAPLAGTCGVLLLSLVITLYCKRGRKKLLYIFKQPFMRPVQTTQEEDGCSCRFPEEEEGGCELRVKFSRSADAPAYKQGQNQLYNELNLGRREEYDVLDKRRGRDPEMGGKPRRKNPQEGLYNELQKDKMAEAYSEIGMKGERRRGKGHDGLYQGLSTATKDTYDALHMQALPPR

SEQ ID NO: 1633 - protein, 465 aa, synthetic construct
  REGION 1..465: note = source = /note="Description of Artificial Sequence: Synthetic polypeptide"
DIQMTQTTSSLSASLGDRVTISCRASQDISKYLNWYQQKPDGTVKLLIYHTSRLHSGVPSRFSGSGSGTDYSLTISNLEQEDIATYFCQQGNTLPYTFGGGTKLEITGGGGSGGGGSGGGGSEVKLQESGPGLVAPSQSLSVTCTVSGVSLPDYGVSWIRQPPRKGLEWLGVIWGSETTYYNSALKSRLTIIKDNSKSQVFLKMNSLQTDDTAIYYCAKHYYYGGSYAMDYWGQGTSVTVSSTTTPAPRPPTPAPTIASQPLSLRPEACRPAAGGAVHTRGLDFACDIYIWAPLAGTCGVLLLSLVITLYCKRGRKKLLYIFKQPFMRPVQTTQEEDGCSCRFPEEEEGGCELRVKFSRSADAPAYKQGQNQLYNELNLGRREEYDVLDKRRGRDPEMGGKPRRKNPQEGLYNELQKDKMAEAYSEIGMKGERRRGKGHDGLYQGLSTATKDTYDALHMQALPPR

SEQ ID NO: 1634 - protein, 5 aa, synthetic construct
  REGION 1..5: note = source = /note="Description of Artificial Sequence: Synthetic peptide"
DYGVS

SEQ ID NO: 1635 - protein, 121 aa, synthetic construct
  REGION 1..121: note = source = /note="Description of Artificial Sequence: Synthetic polypeptide"
QVQLVQSGAEVKKPGSSVKVSCKASGGTFSNYWMHWVRQAPGQGLEWMGATYRGHSDTYYNQKFKGRVTITADKSTSTAYMELSSLRSEDTAVYYCARGAIYDGYDVLDNWGQGTLVTVSS

SEQ ID NO: 1636 - protein, 108 aa, synthetic construct
  REGION 1..108: note = source = /note="Description of Artificial Sequence: Synthetic polypeptide"
DIQMTQSPSSLSASVGDRVTITCSASQDISNYLNWYQQKPGKAPKLLIYYTSNLHSGVPSRFSGSGSGTDFTLTISSLQPEDFATYYCQQYRKLPWTFGQGTKLEIKR

SEQ ID NO: 1637 - protein, 451 aa, synthetic construct
  VARIANT 451: note = /replace=" "
  REGION 1..451: note = MISC_FEATURE - /note="Variant residues given in the sequence have no preference with respect to those in the annotations for variant positions"
  REGION 1..451: note = source = /note="Description of Artificial Sequence: Synthetic polypeptide"
QVQLVQSGAEVKKPGSSVKVSCKASGGTFSNYWMHWVRQAPGQGLEWMGATYRGHSDTYYNQKFKGRVTITADKSTSTAYMELSSLRSEDTAVYYCARGAIYNGYDVLDNWGQGTLVTVSSASTKGPSVFPLAPSSKSTSGGTAALGCLVKDYFPEPVTVSWNSGALTSGVHTFPAVLQSSGLYSLSSVVTVPSSSLGTQTYICNVNHKPSNTKVDKRVEPKSCDKTHTCPPCPAPELLGGPSVFLFPPKPKDTLMISRTPEVTCVVVAVSHEDPEVKFNWYVDGVEVHNAKTKPREEQYNSTYRVVSVLTVLHQDWLNGKEYKCKVSNKALAAPIEKTISKAKGQPREPQVCTLPPSREEMTKNQVSLSCAVKGFYPSDIAVEWESNGQPENNYKTTPPVLDSDGSFFLVSKLTVDKSRWQQGNVFSCSVMHEALHNHYTQKSLSLSPGK

SEQ ID NO: 1638 - protein, 214 aa, synthetic construct
  REGION 1..214: note = source = /note="Description of Artificial Sequence: Synthetic polypeptide"
DIQMTQSPSSLSASVGDRVTITCSASQDISNYLNWYQQKPGKAPKLLIYYTSNLHSGVPSRFSGSGSGTDFTLTISSLQPEDFATYYCQQYRKLPWTFGQGTKLEIKRTVAAPSVFIFPPSDEQLKSGTASVVCLLNNFYPREAKVQWKVDNALQSGNSQESVTEQDSKDSTYSLSSTLTLSKADYEKHKVYACEVTHQGLSSPVTKSFNRGEC

SEQ ID NO: 1639 - protein, 119 aa, synthetic construct
  REGION 1..119: note = source = /note="Description of Artificial Sequence: Synthetic polypeptide"
EVQLLESGGGLVQPGGSLRLSCAASGFTFSSYAMSWVRQAPGKGLEWVSAISGSGGSTYYADSVKGRFTISRDNSKNTLYLQMNSLRAEDTAVYYCAKVAPYFAPFDYWGQGTLVTVSS

SEQ ID NO: 1640 - protein, 109 aa, synthetic construct
  REGION 1..109: note = source = /note="Description of Artificial Sequence: Synthetic polypeptide"
EIVLTQSPGTLSLSPGERATLSCRASQSVSSSYLAWYQQKPGQAPRLLIYGASSRATGIPDRFSGSGSGTDFTLTISRLEPEDFAVYYCQQYGNPPLYTFGQGTKVEIK

SEQ ID NO: 1641 - protein, 449 aa, synthetic construct
  VARIANT 449: note = /replace=" "
  REGION 1..449: note = MISC_FEATURE - /note="Variant residues given in the sequence have no preference with respect to those in the annotations for variant positions"
  REGION 1..449: note = source = /note="Description of Artificial Sequence: Synthetic polypeptide"
EVQLLESGGGLVQPGGSLRLSCAASGFTFSSYAMSWVRQAPGKGLEWVSAISGSGGSTYYADSVKGRFTISRDNSKNTLYLQMNSLRAEDTAVYYCAKVAPYFAPFDYWGQGTLVTVSSASTKGPSVFPLAPSSKSTSGGTAALGCLVKDYFPEPVTVSWNSGALTSGVHTFPAVLQSSGLYSLSSVVTVPSSSLGTQTYICNVNHKPSNTKVDKRVEPKSCDKTHTCPPCPAPELLGGPSVFLFPPKPKDTLMISRTPEVTCVVVDVSHEDPEVKFNWYVDGVEVHNAKTKPREEQYASTYRVVSVLTVLHQDWLNGKEYKCKVSNKALPAPIEKTISKAKGQPREPQVCTLPPSREEMTKNQVSLSCAVKGFYPSDIAVEWESNGQPENNYKTTPPVLDSDGSFFLVSKLTVDKSRWQQGNVFSCSVMHEALHNHYTQKSLSLSPGK

SEQ ID NO: 1642 - protein, 216 aa, synthetic construct
  REGION 1..216: note = source = /note="Description of Artificial Sequence: Synthetic polypeptide"
EIVLTQSPGTLSLSPGERATLSCRASQSVSSSYLAWYQQKPGQAPRLLIYGASSRATGIPDRFSGSGSGTDFTLTISRLEPEDFAVYYCQQYGNPPLYTFGQGTKVEIKRTVAAPSVFIFPPSDEQLKSGTASVVCLLNNFYPREAKVQWKVDNALQSGNSQESVTEQDSKDSTYSLSSTLTLSKADYEKHKVYACEVTHQGLSSPVTKSFNRGEC

SEQ ID NO: 1643 - protein, 117 aa, synthetic construct; identical to SEQ ID NO: 1621
  REGION 1..117: note = source = /note="Description of Artificial Sequence: Synthetic polypeptide"

SEQ ID NO: 1644 - protein, 111 aa, synthetic construct
  REGION 1..111: note = source = /note="Description of Artificial Sequence: Synthetic polypeptide"
DIVLTQSPPSLAMSLGKRATISCRASESVTILGSHLIHWYQQKPGQPPTLLIQLASNVQTGVPARFSGSGSRTDFTLTIDPVEEDDVAVYYCLQSRTIPRTFGGGTKLEIK

SEQ ID NO: 1645 - protein, 447 aa, synthetic construct
  VARIANT 447: note = /replace=" "
  REGION 1..447: note = MISC_FEATURE - /note="Variant residues given in the sequence have no preference with respect to those in the annotations for variant positions"
  REGION 1..447: note = source = /note="Description of Artificial Sequence: Synthetic polypeptide"
QIQLVQSGPELKKPGETVKISCKASGYTFTDYSINWVKRAPGKGLKWMGWINTETREPAYAYDFRGRFAFSLETSASTAYLQINNLKYEDTATYFCALDYSYAMDYWGQGTSVTVSSASTKGPSVFPLAPSSKSTSGGTAALGCLVKDYFPEPVTVSWNSGALTSGVHTFPAVLQSSGLYSLSSVVTVPSSSLGTQTYICNVNHKPSNTKVDKRVEPKSCDKTHTCPPCPAPELLGGPSVFLFPPKPKDTLMISRTPEVTCVVVDVSHEDPEVKFNWYVDGVEVHNAKTKPREEQYASTYRVVSVLTVLHQDWLNGKEYKCKVSNKALPAPIEKTISKAKGQPREPQVCTLPPSREEMTKNQVSLSCAVKGFYPSDIAVEWESNGQPENNYKTTPPVLDSDGSFFLVSKLTVDKSRWQQGNVFSCSVMHEALHNHYTQKSLSLSPGK

SEQ ID NO: 1646 - protein, 218 aa, synthetic construct
  REGION 1..218: note = source = /note="Description of Artificial Sequence: Synthetic polypeptide"
DIVLTQSPASLAMSLGKRATISCRASESVSVIGAHLIHWYQQKPGQPPKLLIYLASNLETGVPARFSGSGSGTDFTLTIDPVEEDDVAIYSCLQSRIFPRTFGGGTKLEIKRTVAAPSVFIFPPSDEQLKSGTASVVCLLNNFYPREAKVQWKVDNALQSGNSQESVTEQDSKDSTYSLSSTLTLSKADYEKHKVYACEVTHQGLSSPVTKSFNRGEC

SEQ ID NO: 1647 - protein, 116 aa, synthetic construct
  REGION 1..116: note = source = /note="Description of Artificial Sequence: Synthetic polypeptide"
EVQLLESGGGLVQPGGSLRLSCAASGFTFSSYAMSWVRQAPGKGLEWVSAISGSGGSTYYADSVKGRFTISRDNSKNTLYLQMNSLRAEDTAVYYCAKVLGWFDYWGQGTLVTVSS

SEQ ID NO: 1648 - protein, 109 aa, synthetic construct
  REGION 1..109: note = source = /note="Description of Artificial Sequence: Synthetic polypeptide"
EIVLTQSPGTLSLSPGERATLSCRASQSVSSSYLAWYQQKPGQAPRLLIYGASSRATGIPDRFSGSGSGTDFTLTISRLEPEDFAVYYCQQYGYPPDFTFGQGTKVEIK

SEQ ID NO: 1649 - protein, 477 aa, synthetic construct
  VARIANT 477: note = /replace=" "
  REGION 1..477: note = MISC_FEATURE - /note="Variant residues given in the sequence have no preference with respect to those in the annotations for variant positions"
  REGION 1..477: note = source = /note="Description of Artificial Sequence: Synthetic polypeptide"
EVQLLESGGGLVQPGGSLRLSCAASGFTFSSYAMSWVRQAPGKGLEWVSAISGSGGSTYYADSVKGRFTISRDNSKNTLYLQMNSLRAEDTAVYYCAKVLGWFDYWGQGTLVTVSSGGGGSGGGGSGGGGSGGGGSEIVLTQSPGTLSLSPGERATLSCRASQSVSSSYLAWYQQKPGQAPRLLIYGASSRATGIPDRFSGSGSGTDFTLTISRLEPEDFAVYYCQQYGYPPDFTFGQGTKVEIKGGGGSDKTHTCPPCPAPELLGGPSVFLFPPKPKDTLMISRTPEVTCVVVAVSHEDPEVKFNWYVDGVEVHNAKTKPREEQYNSTYRVVSVLTVLHQDWLNGKEYKCKVSNKALAAPIEKTISKAKGQPREPQVYTLPPCRDELTKNQVSLWCLVKGFYPSDIAVEWESNGQPENNYKTTPPVLDSDGSFFLYSKLTVDKSRWQQGNVFSCSVMHEALHNHYTQKSLSLSPGK

SEQ ID NO: 1650 - protein, 215 aa, synthetic construct
  REGION 1..215: note = source = /note="Description of Artificial Sequence: Synthetic polypeptide"
QAVVTQEPSLTVSPGGTVTLTCGSSTGAVTTSNYANWVQEKPGQAFRGLIGGTNKRAPGTPARFSGSLLGGKAALTLSGAQPEDEAEYYCALWYSNLWVFGGGTKLTVLGQPKAAPSVTLFPPSSEELQANKATLVCLISDFYPGAVTVAWKADSSPVKAGVETTTPSKQSNNKYAASSYLSLTPEQWKSHRSYSCQVTHEGSTVEKTVAPTECS

SEQ ID NO: 1651 - protein, 449 aa, synthetic construct
  VARIANT 449: note = /replace=" "
  REGION 1..449: note = MISC_FEATURE - /note="Variant residues given in the sequence have no preference with respect to those in the annotations for variant positions"
  REGION 1..449: note = source = /note="Description of Artificial Sequence: Synthetic polypeptide"
EVQLVESGGGLVKPGGSLRLSCAASGFTFSNSGMIWVRQAPGKGLEWVGHIRSKTDGGTTDYAAPVKGRFTISRDDSKNTLYLQMNSLKTEDTAVYYCTTGGSGSFDYWGQGTLVTVSSASTKGPSVFPLAPSSKSTSGGTAALGCLVKDYFPEPVTVSWNSGALTSGVHTFPAVLQSSGLYSLSSVVTVPSSSLGTQTYICNVNHKPSNTKVDKRVEPKSCDKTHTCPPCPAPEAAGGPSVFLFPPKPKDTLMISRTPEVTCVVVDVSHEDPEVKFNWYVDGVEVHNAKTKPREEQYNSTYRVVSVLTVLHQDWLNGKEYKCKVSNKALPAPIEKTISKAKGQPREPQVCTLPPSREEMTKNQVSLSCAVKGFYPSDIAVEWESNGQPENNYKTTPPVLDSDGSFFLVSKLTVDKSRWQQGNVFSCSVMHEALHNHYTQKSLSLSPGK

SEQ ID NO: 1652 - protein, 5 aa, synthetic construct
  REGION 1..5: note = source = /note="Description of Artificial Sequence: Synthetic peptide"
NHGMS

SEQ ID NO: 1653 - protein, 5 aa, synthetic construct
  REGION 1..5: note = source = /note="Description of Artificial Sequence: Synthetic peptide"
NYAMS

SEQ ID NO: 1654 - protein, 5 aa, synthetic construct
  REGION 1..5: note = source = /note="Description of Artificial Sequence: Synthetic peptide"
DYAMH

SEQ ID NO: 1655 - protein, 5 aa, synthetic construct
  REGION 1..5: note = source = /note="Description of Artificial Sequence: Synthetic peptide"
NHGMS

SEQ ID NO: 1656 - protein, 5 aa, synthetic construct
  REGION 1..5: note = source = /note="Description of Artificial Sequence: Synthetic peptide"
NFGIN

SEQ ID NO: 1657 - protein, 5 aa, synthetic construct
  REGION 1..5: note = source = /note="Description of Artificial Sequence: Synthetic peptide"
SDAMT

SEQ ID NO: 1658 - protein, 5 aa, synthetic construct
  REGION 1..5: note = source = /note="Description of Artificial Sequence: Synthetic peptide"
NYGIT

SEQ ID NO: 1659 - protein, 5 aa, synthetic construct
  REGION 1..5: note = source = /note="Description of Artificial Sequence: Synthetic peptide"
NHGMS

SEQ ID NO: 1660-1669 - skipped (10 entries)

SEQ ID NO: 1670 - protein, 5 aa, synthetic construct
  REGION 1..5: note = source = /note="Description of Artificial Sequence: Synthetic peptide"
NHGMS

SEQ ID NO: 1671 - protein, 5 aa, synthetic construct
  REGION 1..5: note = source = /note="Description of Artificial Sequence: Synthetic peptide"
NHGMS

SEQ ID NO: 1672 - protein, 5 aa, synthetic construct
  REGION 1..5: note = source = /note="Description of Artificial Sequence: Synthetic peptide"
DYYMS

SEQ ID NO: 1673 - protein, 5 aa, synthetic construct
  REGION 1..5: note = source = /note="Description of Artificial Sequence: Synthetic peptide"
NHGMS

SEQ ID NO: 1674 - protein, 5 aa, synthetic construct
  REGION 1..5: note = source = /note="Description of Artificial Sequence: Synthetic peptide"
NHGMS

SEQ ID NO: 1675 - protein, 5 aa, synthetic construct
  REGION 1..5: note = source = /note="Description of Artificial Sequence: Synthetic peptide"
NHGMS

SEQ ID NO: 1676 - protein, 7 aa, synthetic construct
  REGION 1..7: note = source = /note="Description of Artificial Sequence: Synthetic peptide"
SSYYYWG

SEQ ID NO: 1677 - protein, 7 aa, synthetic construct
  REGION 1..7: note = source = /note="Description of Artificial Sequence: Synthetic peptide"
TSGMCVS

SEQ ID NO: 1678 - protein, 5 aa, synthetic construct
  REGION 1..5: note = source = /note="Description of Artificial Sequence: Synthetic peptide"
SYSMN

SEQ ID NO: 1679 - protein, 5 aa, synthetic construct
  REGION 1..5: note = source = /note="Description of Artificial Sequence: Synthetic peptide"
DYYMS

SEQ ID NO: 1680 - protein, 5 aa, synthetic construct
  REGION 1..5: note = source = /note="Description of Artificial Sequence: Synthetic peptide"
SHYIH

SEQ ID NO: 1681 - protein, 7 aa, synthetic construct
  REGION 1..7: note = source = /note="Description of Artificial Sequence: Synthetic peptide"
SGGYYWS

SEQ ID NO: 1682 - protein, 5 aa, synthetic construct
  REGION 1..5: note = source = /note="Description of Artificial Sequence: Synthetic peptide"
SYAIS

SEQ ID NO: 1683 - protein, 7 aa, synthetic construct
  REGION 1..7: note = source = /note="Description of Artificial Sequence: Synthetic peptide"
SNSAAWN

SEQ ID NO: 1684 - protein, 5 aa, synthetic construct
  REGION 1..5: note = source = /note="Description of Artificial Sequence: Synthetic peptide"
SYAMS

SEQ ID NO: 1685 - protein, 5 aa, synthetic construct
  REGION 1..5: note = source = /note="Description of Artificial Sequence: Synthetic peptide"
RYPMS

SEQ ID NO: 1686 - protein, 5 aa, synthetic construct
  REGION 1..5: note = source = /note="Description of Artificial Sequence: Synthetic peptide"
SYAMS

SEQ ID NO: 1687 - protein, 5 aa, synthetic construct
  REGION 1..5: note = source = /note="Description of Artificial Sequence: Synthetic peptide"
SYAMS

SEQ ID NO: 1688 - protein, 5 aa, synthetic construct
  REGION 1..5: note = source = /note="Description of Artificial Sequence: Synthetic peptide"
DYAMH

SEQ ID NO: 1689 - protein, 5 aa, synthetic construct
  REGION 1..5: note = source = /note="Description of Artificial Sequence: Synthetic peptide"
DYAMH

SEQ ID NO: 1690 - protein, 5 aa, synthetic construct
  REGION 1..5: note = source = /note="Description of Artificial Sequence: Synthetic peptide"
SYAMS

SEQ ID NO: 1691 - protein, 5 aa, synthetic construct
  REGION 1..5: note = source = /note="Description of Artificial Sequence: Synthetic peptide"
SYAMS

SEQ ID NO: 1692 - protein, 5 aa, synthetic construct
  REGION 1..5: note = source = /note="Description of Artificial Sequence: Synthetic peptide"
SYAMS

SEQ ID NO: 1693 - protein, 5 aa, synthetic construct
  REGION 1..5: note = source = /note="Description of Artificial Sequence: Synthetic peptide"
SYAMS

SEQ ID NO: 1694 - protein, 5 aa, synthetic construct
  REGION 1..5: note = source = /note="Description of Artificial Sequence: Synthetic peptide"
SYAMS

SEQ ID NO: 1695 - protein, 5 aa, synthetic construct
  REGION 1..5: note = source = /note="Description of Artificial Sequence: Synthetic peptide"
SYAMS

SEQ ID NO: 1696 - protein, 5 aa, synthetic construct
  REGION 1..5: note = source = /note="Description of Artificial Sequence: Synthetic peptide"
SYAMS

SEQ ID NO: 1697 - protein, 5 aa, synthetic construct
  REGION 1..5: note = source = /note="Description of Artificial Sequence: Synthetic peptide"
NFGMN

SEQ ID NO: 1698 - protein, 5 aa, synthetic construct
  REGION 1..5: note = source = /note="Description of Artificial Sequence: Synthetic peptide"
DYSIN

SEQ ID NO: 1699 - protein, 5 aa, synthetic construct
  REGION 1..5: note = source = /note="Description of Artificial Sequence: Synthetic peptide"
HYSMN

SEQ ID NO: 1700 - protein, 5 aa, synthetic construct
  REGION 1..5: note = source = /note="Description of Artificial Sequence: Synthetic peptide"
HYSMN

SEQ ID NO: 1701 - protein, 16 aa, synthetic construct
  REGION 1..16: note = source = /note="Description of Artificial Sequence: Synthetic peptide"
GIVYSGSTYYAASVKG

SEQ ID NO: 1702 - protein, 17 aa, synthetic construct
  REGION 1..17: note = source = /note="Description of Artificial Sequence: Synthetic peptide"
GISRSGENTYYADSVKG

SEQ ID NO: 1703 - protein, 17 aa, synthetic construct
  REGION 1..17: note = source = /note="Description of Artificial Sequence: Synthetic peptide"
GISWNSGSIGYADSVKG

SEQ ID NO: 1704 - protein, 16 aa, synthetic construct
  REGION 1..16: note = source = /note="Description of Artificial Sequence: Synthetic peptide"
GIVYSGSTYYAASVKG

SEQ ID NO: 1705 - protein, 17 aa, synthetic construct
  REGION 1..17: note = source = /note="Description of Artificial Sequence: Synthetic peptide"
WINPKNNNTNYAQKFQG

SEQ ID NO: 1706 - protein, 17 aa, synthetic construct
  REGION 1..17: note = source = /note="Description of Artificial Sequence: Synthetic peptide"
VISGSGGTTYYADSVKG

SEQ ID NO: 1707 - protein, 17 aa, synthetic construct
  REGION 1..17: note = source = /note="Description of Artificial Sequence: Synthetic peptide"
WISAYNGNTNYAQKFQG

SEQ ID NO: 1708 - protein, 16 aa, synthetic construct
  REGION 1..16: note = source = /note="Description of Artificial Sequence: Synthetic peptide"
GIVYSGSTYYAASVKG

SEQ ID NO: 1709 - protein, 16 aa, synthetic construct
  REGION 1..16: note = source = /note="Description of Artificial Sequence: Synthetic peptide"
GIVYSGSTYYAASVKG

SEQ ID NO: 1710 - protein, 16 aa, synthetic construct
  REGION 1..16: note = source = /note="Description of Artificial Sequence: Synthetic peptide"
GIVYSGSTYYAASVKG

SEQ ID NO: 1711 - protein, 17 aa, synthetic construct
  REGION 1..17: note = source = /note="Description of Artificial Sequence: Synthetic peptide"
YISSSGSTIYYADSVKG

SEQ ID NO: 1712 - protein, 17 aa, synthetic construct
  REGION 1..17: note = source = /note="Description of Artificial Sequence: Synthetic peptide"
YISSSGNTIYYADSVKG

SEQ ID NO: 1713 - protein, 16 aa, synthetic construct
  REGION 1..16: note = source = /note="Description of Artificial Sequence: Synthetic peptide"
GIVYSGSTYYAASVKG

SEQ ID NO: 1714 - protein, 16 aa, synthetic construct
  REGION 1..16: note = source = /note="Description of Artificial Sequence: Synthetic peptide"
GIVYSGSTYYAASVKG

SEQ ID NO: 1715 - protein, 16 aa, synthetic construct
  REGION 1..16: note = source = /note="Description of Artificial Sequence: Synthetic peptide"
GIVYSGSTYYAASVKG

SEQ ID NO: 1716 - protein, 16 aa, synthetic construct
  REGION 1..16: note = source = /note="Description of Artificial Sequence: Synthetic peptide"
SIYYSGSAYYNPSLKS

SEQ ID NO: 1717 - protein, 16 aa, synthetic construct
  REGION 1..16: note = source = /note="Description of Artificial Sequence: Synthetic peptide"
RIDWDEDKFYSTSLKT

SEQ ID NO: 1718 - protein, 17 aa, synthetic construct
  REGION 1..17: note = source = /note="Description of Artificial Sequence: Synthetic peptide"
SISSSSSYIYYADSVKG

SEQ ID NO: 1719 - protein, 17 aa, synthetic construct
  REGION 1..17: note = source = /note="Description of Artificial Sequence: Synthetic peptide"
YISSSGSTIYYADSVKG

SEQ ID NO: 1720 - protein, 17 aa, synthetic construct
  REGION 1..17: note = source = /note="Description of Artificial Sequence: Synthetic peptide"
MINPSGGVTAYSQTLQG

SEQ ID NO: 1721 - protein, 16 aa, synthetic construct
  REGION 1..16: note = source = /note="Description of Artificial Sequence: Synthetic peptide"
YIYYSGSTYYNPSLKS

SEQ ID NO: 1722 - protein, 17 aa, synthetic construct
  REGION 1..17: note = source = /note="Description of Artificial Sequence: Synthetic peptide"
GIIPIFGTANYAQKFQG

SEQ ID NO: 1723 - protein, 18 aa, synthetic construct
  REGION 1..18: note = source = /note="Description of Artificial Sequence: Synthetic peptide"
RTYYRSKWYSFYAISLKS

SEQ ID NO: 1724 - protein, 17 aa, synthetic construct
  REGION 1..17: note = source = /note="Description of Artificial Sequence: Synthetic peptide"
AISGSGGSTYYADSVKG

SEQ ID NO: 1725 - protein, 17 aa, synthetic construct
  REGION 1..17: note = source = /note="Description of Artificial Sequence: Synthetic peptide"
GISDSGVSTYYADSAKG

SEQ ID NO: 1726 - protein, 17 aa, synthetic construct
  REGION 1..17: note = source = /note="Description of Artificial Sequence: Synthetic peptide"
AISGSGGSTYYADSVKG

SEQ ID NO: 1727 - protein, 17 aa, synthetic construct
  REGION 1..17: note = source = /note="Description of Artificial Sequence: Synthetic peptide"
AISGSGGSTYYADSVKG

SEQ ID NO: 1728 - protein, 17 aa, synthetic construct
  REGION 1..17: note = source = /note="Description of Artificial Sequence: Synthetic peptide"
GISWNSGSIGYADSVKG

SEQ ID NO: 1729 - protein, 17 aa, synthetic construct
  REGION 1..17: note = source = /note="Description of Artificial Sequence: Synthetic peptide"
SINWKGNSLAYGDSVKG

SEQ ID NO: 1730 - protein, 17 aa, synthetic construct
  REGION 1..17: note = source = /note="Description of Artificial Sequence: Synthetic peptide"
AISGSGGSTYYADSVKG

SEQ ID NO: 1731 - protein, 17 aa, synthetic construct
  REGION 1..17: note = source = /note="Description of Artificial Sequence: Synthetic peptide"
AISGSGGSTYYADSVKG

SEQ ID NO: 1732 - protein, 17 aa, synthetic construct
  REGION 1..17: note = source = /note="Description of Artificial Sequence: Synthetic peptide"
AISGSGGSTYYADSVKG

SEQ ID NO: 1733 - protein, 17 aa, synthetic construct
  REGION 1..17: note = source = /note="Description of Artificial Sequence: Synthetic peptide"
AISGSGGSTYYADSVKG

SEQ ID NO: 1734 - protein, 17 aa, synthetic construct
  REGION 1..17: note = source = /note="Description of Artificial Sequence: Synthetic peptide"
AISGSGGSTYYADSVKG

SEQ ID NO: 1735 - protein, 17 aa, synthetic construct
  REGION 1..17: note = source = /note="Description of Artificial Sequence: Synthetic peptide"
AISGSGGSTYYADSVKG

SEQ ID NO: 1736 - protein, 17 aa, synthetic construct
  REGION 1..17: note = source = /note="Description of Artificial Sequence: Synthetic peptide"
AISGSGGSTYYADSVKG

SEQ ID NO: 1737 - protein, 17 aa, synthetic construct
  REGION 1..17: note = source = /note="Description of Artificial Sequence: Synthetic peptide"
WINTYTGESYFADDFKG

SEQ ID NO: 1738 - protein, 17 aa, synthetic construct
  REGION 1..17: note = source = /note="Description of Artificial Sequence: Synthetic peptide"
WINTETREPAYAYDFRG

SEQ ID NO: 1739 - protein, 17 aa, synthetic construct
  REGION 1..17: note = source = /note="Description of Artificial Sequence: Synthetic peptide"
RINTESGVPIYADDFKG

SEQ ID NO: 1740 - protein, 17 aa, synthetic construct
  REGION 1..17: note = source = /note="Description of Artificial Sequence: Synthetic peptide"
RINTETGEPLYADDFKG

SEQ ID NO: 1741 - protein, 7 aa, synthetic construct
  REGION 1..7: note = source = /note="Description of Artificial Sequence: Synthetic peptide"
HGGESDV

SEQ ID NO: 1742 - protein, 11 aa, synthetic construct
  REGION 1..11: note = source = /note="Description of Artificial Sequence: Synthetic peptide"
SPAHYYGGMDV

SEQ ID NO: 1743 - protein, 6 aa, synthetic construct
  REGION 1..6: note = source = /note="Description of Artificial Sequence: Synthetic peptide"
HSFLAY

SEQ ID NO: 1744 - protein, 7 aa, synthetic construct
  REGION 1..7: note = source = /note="Description of Artificial Sequence: Synthetic peptide"
HGGESDV

SEQ ID NO: 1745 - protein, 11 aa, synthetic construct
  REGION 1..11: note = source = /note="Description of Artificial Sequence: Synthetic peptide"
GPYYYQSYMDV

SEQ ID NO: 1746 - protein, 14 aa, synthetic construct
  REGION 1..14: note = source = /note="Description of Artificial Sequence: Synthetic peptide"
LDSSGYYYARGPRY

SEQ ID NO: 1747 - protein, 9 aa, synthetic construct
  REGION 1..9: note = source = /note="Description of Artificial Sequence: Synthetic peptide"
GPYYYYMDV

SEQ ID NO: 1748 - protein, 7 aa, synthetic construct
  REGION 1..7: note = source = /note="Description of Artificial Sequence: Synthetic peptide"
HGGESDV

SEQ ID NO: 1749 - protein, 7 aa, synthetic construct
  REGION 1..7: note = source = /note="Description of Artificial Sequence: Synthetic peptide"
HGGESDV

SEQ ID NO: 1750 - protein, 7 aa, synthetic construct
  REGION 1..7: note = source = /note="Description of Artificial Sequence: Synthetic peptide"
HGGESDV

SEQ ID NO: 1751 - protein, 8 aa, synthetic construct
  REGION 1..8: note = source = /note="Description of Artificial Sequence: Synthetic peptide"
ESGDGMDV

SEQ ID NO: 1752 - protein, 8 aa, synthetic construct
  REGION 1..8: note = source = /note="Description of Artificial Sequence: Synthetic peptide"
STMVREDY

SEQ ID NO: 1753 - protein, 7 aa, synthetic construct
  REGION 1..7: note = source = /note="Description of Artificial Sequence: Synthetic peptide"
HGGESDV

SEQ ID NO: 1754 - protein, 7 aa, synthetic construct
  REGION 1..7: note = source = /note="Description of Artificial Sequence: Synthetic peptide"
HGGESDV

SEQ ID NO: 1755 - protein, 7 aa, synthetic construct
  REGION 1..7: note = source = /note="Description of Artificial Sequence: Synthetic peptide"
HGGESDV

SEQ ID NO: 1756 - protein, 11 aa, synthetic construct
  REGION 1..11: note = source = /note="Description of Artificial Sequence: Synthetic peptide"
HWQEWPDAFDI

SEQ ID NO: 1757 - protein, 13 aa, synthetic construct
  REGION 1..13: note = source = /note="Description of Artificial Sequence: Synthetic peptide"
SGAGGTSATAFDI

SEQ ID NO: 1758 - protein, 10 aa, synthetic construct
  REGION 1..10: note = source = /note="Description of Artificial Sequence: Synthetic peptide"
TIAAVYAFDI

SEQ ID NO: 1759 - protein, 8 aa, synthetic construct
  REGION 1..8: note = source = /note="Description of Artificial Sequence: Synthetic peptide"
DLRGAFDI

SEQ ID NO: 1760 - protein, 11 aa, synthetic construct
  REGION 1..11: note = source = /note="Description of Artificial Sequence: Synthetic peptide"
EGSGSGWYFDF

SEQ ID NO: 1761 - protein, 13 aa, synthetic construct
  REGION 1..13: note = source = /note="Description of Artificial Sequence: Synthetic peptide"
AGIAARLRGAFDI

SEQ ID NO: 1762 - protein, 20 aa, synthetic construct
  REGION 1..20: note = source = /note="Description of Artificial Sequence: Synthetic peptide"
RGGYQLLRWDVGLLRSAFDI

SEQ ID NO: 1763 - protein, 13 aa, synthetic construct
  REGION 1..13: note = source = /note="Description of Artificial Sequence: Synthetic peptide"
SSPEGLFLYWFDP

SEQ ID NO: 1764 - protein, 9 aa, synthetic construct
  REGION 1..9: note = source = /note="Description of Artificial Sequence: Synthetic peptide"
VEGSGSLDY

SEQ ID NO: 1765 - protein, 9 aa, synthetic construct
  REGION 1..9: note = source = /note="Description of Artificial Sequence: Synthetic peptide"
RAGSEASDI

SEQ ID NO: 1766 - protein, 15 aa, synthetic construct
  REGION 1..15: note = source = /note="Description of Artificial Sequence: Synthetic peptide"
ATYKRELRYYYGMDV

SEQ ID NO: 1767 - protein, 15 aa, synthetic construct
  REGION 1..15: note = source = /note="Description of Artificial Sequence: Synthetic peptide"
ATYKRELRYYYGMDV

SEQ ID NO: 1768 - protein, 8 aa, synthetic construct
  REGION 1..8: note = source = /note="Description of Artificial Sequence: Synthetic peptide"
VGKAVPDV

SEQ ID NO: 1769 - protein, 13 aa, synthetic construct
  REGION 1..13: note = source = /note="Description of Artificial Sequence: Synthetic peptide"
HQGVAYYNYAMDV

SEQ ID NO: 1770 - protein, 8 aa, synthetic construct
  REGION 1..8: note = source = /note="Description of Artificial Sequence: Synthetic peptide"
VVRDGMDV

SEQ ID NO: 1771 - protein, 9 aa, synthetic construct
  REGION 1..9: note = source = /note="Description of Artificial Sequence: Synthetic peptide"
IPQTGTFDY

SEQ ID NO: 1772 - protein, 15 aa, synthetic construct
  REGION 1..15: note = source = /note="Description of Artificial Sequence: Synthetic peptide"
ANYKRELRYYYGMDV

SEQ ID NO: 1773 - protein, 11 aa, synthetic construct
  REGION 1..11: note = source = /note="Description of Artificial Sequence: Synthetic peptide"
ALVGATGAFDI

SEQ ID NO: 1774 - protein, 8 aa, synthetic construct
  REGION 1..8: note = source = /note="Description of Artificial Sequence: Synthetic peptide"
WFGEGFDP

SEQ ID NO: 1775 - protein, 17 aa, synthetic construct
  REGION 1..17: note = source = /note="Description of Artificial Sequence: Synthetic peptide"
VGYDSSGYYRDYYGMDV

SEQ ID NO: 1776 - protein, 13 aa, synthetic construct
  REGION 1..13: note = source = /note="Description of Artificial Sequence: Synthetic peptide"
MGWSSGYLGAFDI

SEQ ID NO: 1777 - protein, 13 aa, synthetic construct
  REGION 1..13: note = source = /note="Description of Artificial Sequence: Synthetic peptide"
GEIYYGYDGGFAY

SEQ ID NO: 1778 - protein, 8 aa, synthetic construct
  REGION 1..8: note = source = /note="Description of Artificial Sequence: Synthetic peptide"
DYSYAMDY

SEQ ID NO: 1779 - protein, 8 aa, synthetic construct
  REGION 1..8: note = source = /note="Description of Artificial Sequence: Synthetic peptide"
DYLYSLDF

SEQ ID NO: 1780-1799 - skipped (20 entries)

SEQ ID NO: 1800 - protein, 8 aa, synthetic construct
  REGION 1..8: note = source = /note="Description of Artificial Sequence: Synthetic peptide"
DYLYSCDY

SEQ ID NO: 1801-2503 - skipped (703 entries)

SEQ ID NO: 2504 - protein, 12 aa, synthetic construct
  REGION 1..12: note = source = /note="Description of Artificial Sequence: Synthetic peptide"
RASQSISSSFLA

SEQ ID NO: 2505 - protein, 16 aa, synthetic construct
  REGION 1..16: note = source = /note="Description of Artificial Sequence: Synthetic peptide"
RSSQSLLHSNGYNYLD

SEQ ID NO: 2506 - protein, 16 aa, synthetic construct
  REGION 1..16: note = source = /note="Description of Artificial Sequence: Synthetic peptide"
KSSQSLLRNDGKTPLY

SEQ ID NO: 2507 - protein, 16 aa, synthetic construct
  REGION 1..16: note = source = /note="Description of Artificial Sequence: Synthetic peptide"
RSSQSLLHSNGYNYLN

SEQ ID NO: 2508 - protein, 11 aa, synthetic construct
  REGION 1..11: note = source = /note="Description of Artificial Sequence: Synthetic peptide"
RASQSISSYLN

SEQ ID NO: 2509 - protein, 16 aa, synthetic construct
  REGION 1..16: note = source = /note="Description of Artificial Sequence: Synthetic peptide"
RSSQSLLYSNGYNYVD

SEQ ID NO: 2510 - protein, 11 aa, synthetic construct
  REGION 1..11: note = source = /note="Description of Artificial Sequence: Synthetic peptide"
RASQSVSSNLA

SEQ ID NO: 2511 - protein, 11 aa, synthetic construct
  REGION 1..11: note = source = /note="Description of Artificial Sequence: Synthetic peptide"
RASQSVSSKLA

SEQ ID NO: 2512 - protein, 12 aa, synthetic construct
  REGION 1..12: note = source = /note="Description of Artificial Sequence: Synthetic peptide"
RASQSVGSTNLA

SEQ ID NO: 2513 - protein, 11 aa, synthetic construct
  REGION 1..11: note = source = /note="Description of Artificial Sequence: Synthetic peptide"
RASQSISSYLN

SEQ ID NO: 2514 - protein, 11 aa, synthetic construct
  REGION 1..11: note = source = /note="Description of Artificial Sequence: Synthetic peptide"
RASQSISSYLN

SEQ ID NO: 2515 - protein, 16 aa, synthetic construct
  REGION 1..16: note = source = /note="Description of Artificial Sequence: Synthetic peptide"
KSSESLVHNSGKTYLN

SEQ ID NO: 2516 - protein, 11 aa, synthetic construct
  REGION 1..11: note = source = /note="Description of Artificial Sequence: Synthetic peptide"
QASEDINKFLN

SEQ ID NO: 2517 - protein, 11 aa, synthetic construct
  REGION 1..11: note = source = /note="Description of Artificial Sequence: Synthetic peptide"
RASQSVGSNLA

SEQ ID NO: 2518 - protein, 12 aa, synthetic construct
  REGION 1..12: note = source = /note="Description of Artificial Sequence: Synthetic peptide"
RASQSIGSSSLA

SEQ ID NO: 2519 - protein, 11 aa, synthetic construct
  REGION 1..11: note = source = /note="Description of Artificial Sequence: Synthetic peptide"
KASQDIDDAMN

SEQ ID NO: 2520 - protein, 11 aa, synthetic construct
  REGION 1..11: note = source = /note="Description of Artificial Sequence: Synthetic peptide"
RASQDIYNNLA

SEQ ID NO: 2521 - protein, 16 aa, synthetic construct
  REGION 1..16: note = source = /note="Description of Artificial Sequence: Synthetic peptide"
RSSQSLLHSNGYNYLD

SEQ ID NO: 2522 - protein, 11 aa, synthetic construct
  REGION 1..11: note = source = /note="Description of Artificial Sequence: Synthetic peptide"
GGNNIGTKSVH

SEQ ID NO: 2523 - protein, 11 aa, synthetic construct
  REGION 1..11: note = source = /note="Description of Artificial Sequence: Synthetic peptide"
SGDGLSKKYVS

SEQ ID NO: 2524 - protein, 11 aa, synthetic construct
  REGION 1..11: note = source = /note="Description of Artificial Sequence: Synthetic peptide"
RASQGIRNWLA

SEQ ID NO: 2525 - protein, 11 aa, synthetic construct
  REGION 1..11: note = source = /note="Description of Artificial Sequence: Synthetic peptide"
GGNNIGSKSVH

SEQ ID NO: 2526 - protein, 11 aa, synthetic construct
  REGION 1..11: note = source = /note="Description of Artificial Sequence: Synthetic peptide"
QGDSLGNYYAT

SEQ ID NO: 2527 - protein, 12 aa, synthetic construct
  REGION 1..12: note = source = /note="Description of Artificial Sequence: Synthetic peptide"
RASQSVSSAYLA

SEQ ID NO: 2528 - protein, 11 aa, synthetic construct
  REGION 1..11: note = source = /note="Description of Artificial Sequence: Synthetic peptide"
RASQSVSNSLA

SEQ ID NO: 2529 - protein, 12 aa, synthetic construct
  REGION 1..12: note = source = /note="Description of Artificial Sequence: Synthetic peptide"
RASQSVSSSFLA

SEQ ID NO: 2530 - protein, 12 aa, synthetic construct
  REGION 1..12: note = source = /note="Description of Artificial Sequence: Synthetic peptide"
RASQSVSTTFLA

SEQ ID NO: 2531 - protein, 11 aa, synthetic construct
  REGION 1..11: note = source = /note="Description of Artificial Sequence: Synthetic peptide"
RASQSISSYLN

SEQ ID NO: 2532 - protein, 12 aa, synthetic construct
  REGION 1..12: note = source = /note="Description of Artificial Sequence: Synthetic peptide"
RATQSIGSSFLA

SEQ ID NO: 2533 - protein, 12 aa, synthetic construct
  REGION 1..12: note = source = /note="Description of Artificial Sequence: Synthetic peptide"
RASQSVSSSYLA

SEQ ID NO: 2534 - protein, 12 aa, synthetic construct
  REGION 1..12: note = source = /note="Description of Artificial Sequence: Synthetic peptide"
RASQSVSSSYLA

SEQ ID NO: 2535 - protein, 12 aa, synthetic construct
  REGION 1..12: note = source = /note="Description of Artificial Sequence: Synthetic peptide"
RASQRVASNYLA

SEQ ID NO: 2536 - protein, 12 aa, synthetic construct
  REGION 1..12: note = source = /note="Description of Artificial Sequence: Synthetic peptide"
RASQSLSSNFLA

SEQ ID NO: 2537 - protein, 16 aa, synthetic construct
  REGION 1..16: note = source = /note="Description of Artificial Sequence: Synthetic peptide"
RSSQSLLHSNGYNYLD

SEQ ID NO: 2538 - protein, 12 aa, synthetic construct
  REGION 1..12: note = source = /note="Description of Artificial Sequence: Synthetic peptide"
RASQSVSSSYLA

SEQ ID NO: 2539 - protein, 12 aa, synthetic construct
  REGION 1..12: note = source = /note="Description of Artificial Sequence: Synthetic peptide"
RASQSVASSFLA

SEQ ID NO: 2540 - protein, 11 aa, synthetic construct
  REGION 1..11: note = source = /note="Description of Artificial Sequence: Synthetic peptide"
RASQDVNTAVS

SEQ ID NO: 2541 - protein, 15 aa, synthetic construct
  REGION 1..15: note = source = /note="Description of Artificial Sequence: Synthetic peptide"
RASESVSVIGAHLIH

SEQ ID NO: 2542 - protein, 15 aa, synthetic construct
  REGION 1..15: note = source = /note="Description of Artificial Sequence: Synthetic peptide"
RASESVTILGSHLIY

SEQ ID NO: 2543 - protein, 15 aa, synthetic construct
  REGION 1..15: note = source = /note="Description of Artificial Sequence: Synthetic peptide"
RASESVTILGSHLIY

SEQ ID NO: 2544 - protein, 7 aa, synthetic construct
  REGION 1..7: note = source = /note="Description of Artificial Sequence: Synthetic peptide"
GASRRAT

SEQ ID NO: 2545 - protein, 7 aa, synthetic construct
  REGION 1..7: note = source = /note="Description of Artificial Sequence: Synthetic peptide"
LGSNRAS

SEQ ID NO: 2546 - protein, 7 aa, synthetic construct
  REGION 1..7: note = source = /note="Description of Artificial Sequence: Synthetic peptide"
EVSNRFS

SEQ ID NO: 2547 - protein, 7 aa, synthetic construct
  REGION 1..7: note = source = /note="Description of Artificial Sequence: Synthetic peptide"
LGSKRAS

SEQ ID NO: 2548 - protein, 7 aa, synthetic construct
  REGION 1..7: note = source = /note="Description of Artificial Sequence: Synthetic peptide"
GASTLAS

SEQ ID NO: 2549 - protein, 7 aa, synthetic construct
  REGION 1..7: note = source = /note="Description of Artificial Sequence: Synthetic peptide"
LGSNRAS

SEQ ID NO: 2550 - protein, 7 aa, synthetic construct
  REGION 1..7: note = source = /note="Description of Artificial Sequence: Synthetic peptide"
GASTRAS

SEQ ID NO: 2551 - protein, 7 aa, synthetic construct
  REGION 1..7: note = source = /note="Description of Artificial Sequence: Synthetic peptide"
GASIRAT

SEQ ID NO: 2552 - protein, 7 aa, synthetic construct
  REGION 1..7: note = source = /note="Description of Artificial Sequence: Synthetic peptide"
DASNRAT

SEQ ID NO: 2553 - protein, 7 aa, synthetic construct
  REGION 1..7: note = source = /note="Description of Artificial Sequence: Synthetic peptide"
AASSLQS

SEQ ID NO: 2554 - protein, 7 aa, synthetic construct
  REGION 1..7: note = source = /note="Description of Artificial Sequence: Synthetic peptide"
AASSLQS

SEQ ID NO: 2555 - protein, 7 aa, synthetic construct
  REGION 1..7: note = source = /note="Description of Artificial Sequence: Synthetic peptide"
EVSNRDS

SEQ ID NO: 2556 - protein, 7 aa, synthetic construct
  REGION 1..7: note = source = /note="Description of Artificial Sequence: Synthetic peptide"
DASTLQT

SEQ ID NO: 2557 - protein, 7 aa, synthetic construct
  REGION 1..7: note = source = /note="Description of Artificial Sequence: Synthetic peptide"
GASTRAT

SEQ ID NO: 2558 - protein, 7 aa, synthetic construct
  REGION 1..7: note = source = /note="Description of Artificial Sequence: Synthetic peptide"
GASSRAS

SEQ ID NO: 2559 - protein, 7 aa, synthetic construct
  REGION 1..7: note = source = /note="Description of Artificial Sequence: Synthetic peptide"
SATSPVP

SEQ ID NO: 2560 - protein, 7 aa, synthetic construct
  REGION 1..7: note = source = /note="Description of Artificial Sequence: Synthetic peptide"
AANKSQS

SEQ ID NO: 2561 - protein, 7 aa, synthetic construct
  REGION 1..7: note = source = /note="Description of Artificial Sequence: Synthetic peptide"
LGSNRAS

SEQ ID NO: 2562 - protein, 7 aa, synthetic construct
  REGION 1..7: note = source = /note="Description of Artificial Sequence: Synthetic peptide"
DDSVRPS

SEQ ID NO: 2563 - protein, 7 aa, synthetic construct
  REGION 1..7: note = source = /note="Description of Artificial Sequence: Synthetic peptide"
RDKERPS

SEQ ID NO: 2564 - protein, 7 aa, synthetic construct
  REGION 1..7: note = source = /note="Description of Artificial Sequence: Synthetic peptide"
AASNLQS

SEQ ID NO: 2565 - protein, 7 aa, synthetic construct
  REGION 1..7: note = source = /note="Description of Artificial Sequence: Synthetic peptide"
GKNNRPS

SEQ ID NO: 2566 - protein, 7 aa, synthetic construct
  REGION 1..7: note = source = /note="Description of Artificial Sequence: Synthetic peptide"
GTNNRPS

SEQ ID NO: 2567 - protein, 7 aa, synthetic construct
  REGION 1..7: note = source = /note="Description of Artificial Sequence: Synthetic peptide"
GASTRAT

SEQ ID NO: 2568 - protein, 7 aa, synthetic construct
  REGION 1..7: note = source = /note="Description of Artificial Sequence: Synthetic peptide"
DASSRAT

SEQ ID NO: 2569 - protein, 7 aa, synthetic construct
  REGION 1..7: note = source = /note="Description of Artificial Sequence: Synthetic peptide"
GASSRAT

SEQ ID NO: 2570 - protein, 7 aa, synthetic construct
  REGION 1..7: note = source = /note="Description of Artificial Sequence: Synthetic peptide"
GSSNRAT

SEQ ID NO: 2571 - protein, 7 aa, synthetic construct
  REGION 1..7: note = source = /note="Description of Artificial Sequence: Synthetic peptide"
AASSLQS

SEQ ID NO: 2572 - protein, 7 aa, synthetic construct
  REGION 1..7: note = source = /note="Description of Artificial Sequence: Synthetic peptide"
GASQRAT

SEQ ID NO: 2573 - protein, 7 aa, synthetic construct
  REGION 1..7: note = source = /note="Description of Artificial Sequence: Synthetic peptide"
GASSRAT

SEQ ID NO: 2574 - protein, 7 aa, synthetic construct
  REGION 1..7: note = source = /note="Description of Artificial Sequence: Synthetic peptide"
GASSRAT

SEQ ID NO: 2575 - protein, 7 aa, synthetic construct
  REGION 1..7: note = source = /note="Description of Artificial Sequence: Synthetic peptide"
GASSRAT

SEQ ID NO: 2576 - protein, 7 aa, synthetic construct
  REGION 1..7: note = source = /note="Description of Artificial Sequence: Synthetic peptide"
GASNWAT

SEQ ID NO: 2577 - protein, 7 aa, synthetic construct
  REGION 1..7: note = source = /note="Description of Artificial Sequence: Synthetic peptide"
LGSNRAS

SEQ ID NO: 2578 - protein, 7 aa, synthetic construct
  REGION 1..7: note = source = /note="Description of Artificial Sequence: Synthetic peptide"
GTSSRAT

SEQ ID NO: 2579 - protein, 7 aa, synthetic construct
  REGION 1..7: note = source = /note="Description of Artificial Sequence: Synthetic peptide"
GASGRAT

SEQ ID NO: 2580 - protein, 7 aa, synthetic construct
  REGION 1..7: note = source = /note="Description of Artificial Sequence: Synthetic peptide"
SASYRYT

SEQ ID NO: 2581 - protein, 7 aa, synthetic construct
  REGION 1..7: note = source = /note="Description of Artificial Sequence: Synthetic peptide"
LASNLET

SEQ ID NO: 2582 - protein, 7 aa, synthetic construct
  REGION 1..7: note = source = /note="Description of Artificial Sequence: Synthetic peptide"
LASNVQT

SEQ ID NO: 2583 - protein, 7 aa, synthetic construct
  REGION 1..7: note = source = /note="Description of Artificial Sequence: Synthetic peptide"
LASNVQT

SEQ ID NO: 2584 - protein, 10 aa, synthetic construct
  REGION 1..10: note = source = /note="Description of Artificial Sequence: Synthetic peptide"
QQYHSSPSWT

SEQ ID NO: 2585 - protein, 9 aa, synthetic construct
  REGION 1..9: note = source = /note="Description of Artificial Sequence: Synthetic peptide"
MQALQTPYT

SEQ ID NO: 2586 - protein, 8 aa, synthetic construct
  REGION 1..8: note = source = /note="Description of Artificial Sequence: Synthetic peptide"
MQNIQFPS

SEQ ID NO: 2587 - protein, 9 aa, synthetic construct
  REGION 1..9: note = source = /note="Description of Artificial Sequence: Synthetic peptide"
MQALQTPYT

SEQ ID NO: 2588 - protein, 8 aa, synthetic construct
  REGION 1..8: note = source = /note="Description of Artificial Sequence: Synthetic peptide"
QQSYKRAS

SEQ ID NO: 2589 - protein, 9 aa, synthetic construct
  REGION 1..9: note = source = /note="Description of Artificial Sequence: Synthetic peptide"
MQGRQFPYS

SEQ ID NO: 2590 - protein, 8 aa, synthetic construct
  REGION 1..8: note = source = /note="Description of Artificial Sequence: Synthetic peptide"
QQYGSSLT

SEQ ID NO: 2591 - protein, 9 aa, synthetic construct
  REGION 1..9: note = source = /note="Description of Artificial Sequence: Synthetic peptide"
QQYGSSSWT

SEQ ID NO: 2592 - protein, 10 aa, synthetic construct
  REGION 1..10: note = source = /note="Description of Artificial Sequence: Synthetic peptide"
QQYGSSPPWT

SEQ ID NO: 2593 - protein, 7 aa, synthetic construct
  REGION 1..7: note = source = /note="Description of Artificial Sequence: Synthetic peptide"
QQSYTLA

SEQ ID NO: 2594 - protein, 9 aa, synthetic construct
  REGION 1..9: note = source = /note="Description of Artificial Sequence: Synthetic peptide"
QQSYSTPYT

SEQ ID NO: 2595 - protein, 9 aa, synthetic construct
  REGION 1..9: note = source = /note="Description of Artificial Sequence: Synthetic peptide"
MQGTHWPGT

SEQ ID NO: 2596 - protein, 9 aa, synthetic construct
  REGION 1..9: note = source = /note="Description of Artificial Sequence: Synthetic peptide"
QQYESLPLT

SEQ ID NO: 2597 - protein, 10 aa, synthetic construct
  REGION 1..10: note = source = /note="Description of Artificial Sequence: Synthetic peptide"
QQYNDWLPVT

SEQ ID NO: 2598 - protein, 10 aa, synthetic construct
  REGION 1..10: note = source = /note="Description of Artificial Sequence: Synthetic peptide"
QQYAGSPPFT

SEQ ID NO: 2599 - protein, 9 aa, synthetic construct
  REGION 1..9: note = source = /note="Description of Artificial Sequence: Synthetic peptide"
LQHDNFPLT

SEQ ID NO: 2600 - protein, 9 aa, synthetic construct
  REGION 1..9: note = source = /note="Description of Artificial Sequence: Synthetic peptide"
QHYYRFPYS

SEQ ID NO: 2601 - protein, 9 aa, synthetic construct
  REGION 1..9: note = source = /note="Description of Artificial Sequence: Synthetic peptide"
MQALQTPYT

SEQ ID NO: 2602 - protein, 11 aa, synthetic construct
  REGION 1..11: note = source = /note="Description of Artificial Sequence: Synthetic peptide"
QVWDSDSEHVV

SEQ ID NO: 2603 - protein, 9 aa, synthetic construct
  REGION 1..9: note = source = /note="Description of Artificial Sequence: Synthetic peptide"
QAWDDTTVV

SEQ ID NO: 2604 - protein, 9 aa, synthetic construct
  REGION 1..9: note = source = /note="Description of Artificial Sequence: Synthetic peptide"
QKYNSAPFT

SEQ ID NO: 2605 - protein, 12 aa, synthetic construct
  REGION 1..12: note = source = /note="Description of Artificial Sequence: Synthetic peptide"
SSRDSSGDHLRV

SEQ ID NO: 2606 - protein, 11 aa, synthetic construct
  REGION 1..11: note = source = /note="Description of Artificial Sequence: Synthetic peptide"
NSRDSSGHHLL

SEQ ID NO: 2607 - protein, 14 aa, synthetic construct
  REGION 1..14: note = source = /note="Description of Artificial Sequence: Synthetic peptide"
QHYGSSFNGSSLFT

SEQ ID NO: 2608 - protein, 10 aa, synthetic construct
  REGION 1..10: note = source = /note="Description of Artificial Sequence: Synthetic peptide"
QQFGTSSGLT

SEQ ID NO: 2609 - protein, 10 aa, synthetic construct
  REGION 1..10: note = source = /note="Description of Artificial Sequence: Synthetic peptide"
QQYHSSPSWT

SEQ ID NO: 2610 - protein, 10 aa, synthetic construct
  REGION 1..10: note = source = /note="Description of Artificial Sequence: Synthetic peptide"
QQYHSSPSWT

SEQ ID NO: 2611 - protein, 9 aa, synthetic construct
  REGION 1..9: note = source = /note="Description of Artificial Sequence: Synthetic peptide"
QQSYSTPYS

SEQ ID NO: 2612 - protein, 10 aa, synthetic construct
  REGION 1..10: note = source = /note="Description of Artificial Sequence: Synthetic peptide"
QHYESSPSWT

SEQ ID NO: 2613 - protein, 10 aa, synthetic construct
  REGION 1..10: note = source = /note="Description of Artificial Sequence: Synthetic peptide"
QQYGSPPRFT

SEQ ID NO: 2614 - protein, 10 aa, synthetic construct
  REGION 1..10: note = source = /note="Description of Artificial Sequence: Synthetic peptide"
QHYGSSPSWT

SEQ ID NO: 2615 - protein, 10 aa, synthetic construct
  REGION 1..10: note = source = /note="Description of Artificial Sequence: Synthetic peptide"
QHYDSSPSWT

SEQ ID NO: 2616 - protein, 10 aa, synthetic construct
  REGION 1..10: note = source = /note="Description of Artificial Sequence: Synthetic peptide"
QYYGTSPMYT

SEQ ID NO: 2617 - protein, 9 aa, synthetic construct
  REGION 1..9: note = source = /note="Description of Artificial Sequence: Synthetic peptide"
MQALQTPLT

SEQ ID NO: 2618 - protein, 11 aa, synthetic construct
  REGION 1..11: note = source = /note="Description of Artificial Sequence: Synthetic peptide"
QHYGNSPPKFT

SEQ ID NO: 2619 - protein, 10 aa, synthetic construct
  REGION 1..10: note = source = /note="Description of Artificial Sequence: Synthetic peptide"
QHYGGSPRLT

SEQ ID NO: 2620 - protein, 9 aa, synthetic construct
  REGION 1..9: note = source = /note="Description of Artificial Sequence: Synthetic peptide"
QQHYSTPWT

SEQ ID NO: 2621 - protein, 9 aa, synthetic construct
  REGION 1..9: note = source = /note="Description of Artificial Sequence: Synthetic peptide"
LQSRIFPRT

SEQ ID NO: 2622 - protein, 9 aa, synthetic construct
  REGION 1..9: note = source = /note="Description of Artificial Sequence: Synthetic peptide"
LQSRTIPRT

SEQ ID NO: 2623 - protein, 9 aa, synthetic construct
  REGION 1..9: note = source = /note="Description of Artificial Sequence: Synthetic peptide"
LQSRTIPRT

SEQ ID NO: 2624-2863 - skipped (240 entries)

SEQ ID NO: 2864 - protein, 10 aa, synthetic construct
  REGION 1..10: note = source = /note="Description of Artificial Sequence: Synthetic peptide"
GFTFSNYAMS

SEQ ID NO: 2865 - protein, 10 aa, synthetic construct
  REGION 1..10: note = source = /note="Description of Artificial Sequence: Synthetic peptide"
GFTFDDYAMH

SEQ ID NO: 2866 - protein, 10 aa, synthetic construct
  REGION 1..10: note = source = /note="Description of Artificial Sequence: Synthetic peptide"
GFALSNHGMS

SEQ ID NO: 2867 - protein, 10 aa, synthetic construct
  REGION 1..10: note = source = /note="Description of Artificial Sequence: Synthetic peptide"
GYIFDNFGIN

SEQ ID NO: 2868 - protein, 10 aa, synthetic construct
  REGION 1..10: note = source = /note="Description of Artificial Sequence: Synthetic peptide"
GFTFSSDAMT

SEQ ID NO: 2869 - protein, 10 aa, synthetic construct
  REGION 1..10: note = source = /note="Description of Artificial Sequence: Synthetic peptide"
GYTFSNYGIT

SEQ ID NO: 2870 - protein, 10 aa, synthetic construct
  REGION 1..10: note = source = /note="Description of Artificial Sequence: Synthetic peptide"
GFALSNHGMS

SEQ ID NO: 2871 - protein, 10 aa, synthetic construct
  REGION 1..10: note = source = /note="Description of Artificial Sequence: Synthetic peptide"
GFALSNHGMS

SEQ ID NO: 2872 - protein, 10 aa, synthetic construct
  REGION 1..10: note = source = /note="Description of Artificial Sequence: Synthetic peptide"
GFALSNHGMS

SEQ ID NO: 2873 - protein, 10 aa, synthetic construct
  REGION 1..10: note = source = /note="Description of Artificial Sequence: Synthetic peptide"
GFTFSDYYMS

SEQ ID NO: 2874 - protein, 10 aa, synthetic construct
  REGION 1..10: note = source = /note="Description of Artificial Sequence: Synthetic peptide"
GFALSNHGMS

SEQ ID NO: 2875 - protein, 10 aa, synthetic construct
  REGION 1..10: note = source = /note="Description of Artificial Sequence: Synthetic peptide"
GFTFSDYYMS

SEQ ID NO: 2876 - protein, 10 aa, synthetic construct
  REGION 1..10: note = source = /note="Description of Artificial Sequence: Synthetic peptide"
GFALSNHGMS

SEQ ID NO: 2877 - protein, 10 aa, synthetic construct
  REGION 1..10: note = source = /note="Description of Artificial Sequence: Synthetic peptide"
GFALSNHGMS

SEQ ID NO: 2878 - protein, 10 aa, synthetic construct
  REGION 1..10: note = source = /note="Description of Artificial Sequence: Synthetic peptide"
GFALSNHGMS

SEQ ID NO: 2879 - protein, 12 aa, synthetic construct
  REGION 1..12: note = source = /note="Description of Artificial Sequence: Synthetic peptide"
GGSISSSYYYWG

SEQ ID NO: 2880 - protein, 12 aa, synthetic construct
  REGION 1..12: note = source = /note="Description of Artificial Sequence: Synthetic peptide"
GFSLRTSGMCVS

SEQ ID NO: 2881 - protein, 10 aa, synthetic construct
  REGION 1..10: note = source = /note="Description of Artificial Sequence: Synthetic peptide"
GFTFSSYSMN

SEQ ID NO: 2882 - protein, 10 aa, synthetic construct
  REGION 1..10: note = source = /note="Description of Artificial Sequence: Synthetic peptide"
GFTFSDYYMS

SEQ ID NO: 2883 - protein, 10 aa, synthetic construct
  REGION 1..10: note = source = /note="Description of Artificial Sequence: Synthetic peptide"
GYTVTSHYIH

SEQ ID NO: 2884 - protein, 12 aa, synthetic construct
  REGION 1..12: note = source = /note="Description of Artificial Sequence: Synthetic peptide"
GGSISSGGYYWS

SEQ ID NO: 2885 - protein, 10 aa, synthetic construct
  REGION 1..10: note = source = /note="Description of Artificial Sequence: Synthetic peptide"
GGTFSSYAIS

SEQ ID NO: 2886 - protein, 12 aa, synthetic construct
  REGION 1..12: note = source = /note="Description of Artificial Sequence: Synthetic peptide"
GDSVSSNSAAWN

SEQ ID NO: 2887 - protein, 10 aa, synthetic construct
  REGION 1..10: note = source = /note="Description of Artificial Sequence: Synthetic peptide"
GFTFSSYAMS

SEQ ID NO: 2888 - protein, 10 aa, synthetic construct
  REGION 1..10: note = source = /note="Description of Artificial Sequence: Synthetic peptide"
GITFSRYPMS

SEQ ID NO: 2889 - protein, 10 aa, synthetic construct
  REGION 1..10: note = source = /note="Description of Artificial Sequence: Synthetic peptide"
GFTFSSYAMS

SEQ ID NO: 2890 - protein, 10 aa, synthetic construct
  REGION 1..10: note = source = /note="Description of Artificial Sequence: Synthetic peptide"
GFTFSSYAMS

SEQ ID NO: 2891 - protein, 10 aa, synthetic construct
  REGION 1..10: note = source = /note="Description of Artificial Sequence: Synthetic peptide"
GFTFDDYAMH

SEQ ID NO: 2892 - protein, 10 aa, synthetic construct
  REGION 1..10: note = source = /note="Description of Artificial Sequence: Synthetic peptide"
GFTFDDYAMH

SEQ ID NO: 2893 - protein, 10 aa, synthetic construct
  REGION 1..10: note = source = /note="Description of Artificial Sequence: Synthetic peptide"
GFTFSSYAMS

SEQ ID NO: 2894 - protein, 10 aa, synthetic construct
  REGION 1..10: note = source = /note="Description of Artificial Sequence: Synthetic peptide"
GFTFSSYAMS

SEQ ID NO: 2895 - protein, 10 aa, synthetic construct
  REGION 1..10: note = source = /note="Description of Artificial Sequence: Synthetic peptide"
GFTFSSYAMS

SEQ ID NO: 2896 - protein, 10 aa, synthetic construct
  REGION 1..10: note = source = /note="Description of Artificial Sequence: Synthetic peptide"
GFSFSSYAMS

SEQ ID NO: 2897 - protein, 10 aa, synthetic construct
  REGION 1..10: note = source = /note="Description of Artificial Sequence: Synthetic peptide"
GFTFSSYAMS

SEQ ID NO: 2898 - protein, 10 aa, synthetic construct
  REGION 1..10: note = source = /note="Description of Artificial Sequence: Synthetic peptide"
GFTFSSYAMS

SEQ ID NO: 2899 - protein, 10 aa, synthetic construct
  REGION 1..10: note = source = /note="Description of Artificial Sequence: Synthetic peptide"
GFTFSSYAMS

SEQ ID NO: 2900 - protein, 10 aa, synthetic construct
  REGION 1..10: note = source = /note="Description of Artificial Sequence: Synthetic peptide"
GYTFTNFGMN

SEQ ID NO: 2901 - protein, 10 aa, synthetic construct
  REGION 1..10: note = source = /note="Description of Artificial Sequence: Synthetic peptide"
GYTFTDYSIN

SEQ ID NO: 2902 - protein, 10 aa, synthetic construct
  REGION 1..10: note = source = /note="Description of Artificial Sequence: Synthetic peptide"
GYTFRHYSMN

SEQ ID NO: 2903 - protein, 10 aa, synthetic construct
  REGION 1..10: note = source = /note="Description of Artificial Sequence: Synthetic peptide"
GYTFTHYSMN

SEQ ID NO: 2904 - protein, 17 aa, synthetic construct
  REGION 1..17: note = source = /note="Description of Artificial Sequence: Synthetic peptide"
GISRSGENTYYADSVKG

SEQ ID NO: 2905 - protein, 17 aa, synthetic construct
  REGION 1..17: note = source = /note="Description of Artificial Sequence: Synthetic peptide"
GISWNSGSIGYADSVKG

SEQ ID NO: 2906 - protein, 16 aa, synthetic construct
  REGION 1..16: note = source = /note="Description of Artificial Sequence: Synthetic peptide"
GIVYSGSTYYAASVKG

SEQ ID NO: 2907 - protein, 17 aa, synthetic construct
  REGION 1..17: note = source = /note="Description of Artificial Sequence: Synthetic peptide"
WINPKNNNTNYAQKFQG

SEQ ID NO: 2908 - protein, 17 aa, synthetic construct
  REGION 1..17: note = source = /note="Description of Artificial Sequence: Synthetic peptide"
VISGSGGTTYYADSVKG

SEQ ID NO: 2909 - protein, 17 aa, synthetic construct
  REGION 1..17: note = source = /note="Description of Artificial Sequence: Synthetic peptide"
WISAYNGNTNYAQKFQG

SEQ ID NO: 2910 - protein, 16 aa, synthetic construct
  REGION 1..16: note = source = /note="Description of Artificial Sequence: Synthetic peptide"
GIVYSGSTYYAASVKG

SEQ ID NO: 2911 - protein, 16 aa, synthetic construct
  REGION 1..16: note = source = /note="Description of Artificial Sequence: Synthetic peptide"
GIVYSGSTYYAASVKG

SEQ ID NO: 2912 - protein, 16 aa, synthetic construct
  REGION 1..16: note = source = /note="Description of Artificial Sequence: Synthetic peptide"
GIVYSGSTYYAASVKG

SEQ ID NO: 2913 - protein, 17 aa, synthetic construct
  REGION 1..17: note = source = /note="Description of Artificial Sequence: Synthetic peptide"
YISSSGSTIYYADSVKG

SEQ ID NO: 2914 - protein, 16 aa, synthetic construct
  REGION 1..16: note = source = /note="Description of Artificial Sequence: Synthetic peptide"
GIVYSGSTYYAASVKG

SEQ ID NO: 2915 - protein, 17 aa, synthetic construct
  REGION 1..17: note = source = /note="Description of Artificial Sequence: Synthetic peptide"
YISSSGNTIYYADSVKG

SEQ ID NO: 2916 - protein, 16 aa, synthetic construct
  REGION 1..16: note = source = /note="Description of Artificial Sequence: Synthetic peptide"
GIVYSGSTYYAASVKG

SEQ ID NO: 2917 - protein, 16 aa, synthetic construct
  REGION 1..16: note = source = /note="Description of Artificial Sequence: Synthetic peptide"
GIVYSGSTYYAASVKG

SEQ ID NO: 2918 - protein, 16 aa, synthetic construct
  REGION 1..16: note = source = /note="Description of Artificial Sequence: Synthetic peptide"
GIVYSGSTYYAASVKG

SEQ ID NO: 2919 - protein, 16 aa, synthetic construct
  REGION 1..16: note = source = /note="Description of Artificial Sequence: Synthetic peptide"
SIYYSGSAYYNPSLKS

SEQ ID NO: 2920 - protein, 16 aa, synthetic construct
  REGION 1..16: note = source = /note="Description of Artificial Sequence: Synthetic peptide"
RIDWDEDKFYSTSLKT

SEQ ID NO: 2921 - protein, 17 aa, synthetic construct
  REGION 1..17: note = source = /note="Description of Artificial Sequence: Synthetic peptide"
SISSSSSYIYYADSVKG

SEQ ID NO: 2922 - protein, 17 aa, synthetic construct
  REGION 1..17: note = source = /note="Description of Artificial Sequence: Synthetic peptide"
YISSSGSTIYYADSVKG

SEQ ID NO: 2923 - protein, 17 aa, synthetic construct
  REGION 1..17: note = source = /note="Description of Artificial Sequence: Synthetic peptide"
MINPSGGVTAYSQTLQG

SEQ ID NO: 2924 - protein, 16 aa, synthetic construct
  REGION 1..16: note = source = /note="Description of Artificial Sequence: Synthetic peptide"
YIYYSGSTYYNPSLKS

SEQ ID NO: 2925 - protein, 17 aa, synthetic construct
  REGION 1..17: note = source = /note="Description of Artificial Sequence: Synthetic peptide"
GIIPIFGTANYAQKFQG

SEQ ID NO: 2926 - protein, 18 aa, synthetic construct
  REGION 1..18: note = source = /note="Description of Artificial Sequence: Synthetic peptide"
RTYYRSKWYSFYAISLKS

SEQ ID NO: 2927 - protein, 17 aa, synthetic construct
  REGION 1..17: note = source = /note="Description of Artificial Sequence: Synthetic peptide"
AISGSGGSTYYADSVKG

SEQ ID NO: 2928 - protein, 17 aa, synthetic construct
  REGION 1..17: note = source = /note="Description of Artificial Sequence: Synthetic peptide"
GISDSGVSTYYADSAKG

SEQ ID NO: 2929 - protein, 17 aa, synthetic construct
  REGION 1..17: note = source = /note="Description of Artificial Sequence: Synthetic peptide"
AISGSGGSTYYADSVKG

SEQ ID NO: 2930 - protein, 17 aa, synthetic construct
  REGION 1..17: note = source = /note="Description of Artificial Sequence: Synthetic peptide"
AISGSGGSTYYADSVKG

SEQ ID NO: 2931 - protein, 17 aa, synthetic construct
  REGION 1..17: note = source = /note="Description of Artificial Sequence: Synthetic peptide"
GISWNSGSIGYADSVKG

SEQ ID NO: 2932 - protein, 17 aa, synthetic construct
  REGION 1..17: note = source = /note="Description of Artificial Sequence: Synthetic peptide"
SINWKGNSLAYGDSVKG

SEQ ID NO: 2933 - protein, 17 aa, synthetic construct
  REGION 1..17: note = source = /note="Description of Artificial Sequence: Synthetic peptide"
AISGSGGSTYYADSVKG

SEQ ID NO: 2934 - protein, 17 aa, synthetic construct
  REGION 1..17: note = source = /note="Description of Artificial Sequence: Synthetic peptide"
AISGSGGSTYYADSVKG

SEQ ID NO: 2935 - protein, 17 aa, synthetic construct
  REGION 1..17: note = source = /note="Description of Artificial Sequence: Synthetic peptide"
AISGSGGSTYYADSVKG

SEQ ID NO: 2936 - protein, 17 aa, synthetic construct
  REGION 1..17: note = source = /note="Description of Artificial Sequence: Synthetic peptide"
AISGSGGSTYYADSVKG

SEQ ID NO: 2937 - protein, 17 aa, synthetic construct
  REGION 1..17: note = source = /note="Description of Artificial Sequence: Synthetic peptide"
AISGSGGSTYYADSVKG

SEQ ID NO: 2938 - protein, 17 aa, synthetic construct
  REGION 1..17: note = source = /note="Description of Artificial Sequence: Synthetic peptide"
AISGSGGSTYYADSVKG

SEQ ID NO: 2939 - protein, 17 aa, synthetic construct
  REGION 1..17: note = source = /note="Description of Artificial Sequence: Synthetic peptide"
AISGSGGSTYYADSVKG

SEQ ID NO: 2940 - protein, 17 aa, synthetic construct
  REGION 1..17: note = source = /note="Description of Artificial Sequence: Synthetic peptide"
WINTYTGESYFADDFKG

SEQ ID NO: 2941 - protein, 17 aa, synthetic construct
  REGION 1..17: note = source = /note="Description of Artificial Sequence: Synthetic peptide"
WINTETREPAYAYDFRG

SEQ ID NO: 2942 - protein, 17 aa, synthetic construct
  REGION 1..17: note = source = /note="Description of Artificial Sequence: Synthetic peptide"
RINTESGVPIYADDFKG

SEQ ID NO: 2943 - protein, 17 aa, synthetic construct
  REGION 1..17: note = source = /note="Description of Artificial Sequence: Synthetic peptide"
RINTETGEPLYADDFKG

SEQ ID NO: 2944 - protein, 11 aa, synthetic construct
  REGION 1..11: note = source = /note="Description of Artificial Sequence: Synthetic peptide"
SPAHYYGGMDV

SEQ ID NO: 2945 - protein, 6 aa, synthetic construct
  REGION 1..6: note = source = /note="Description of Artificial Sequence: Synthetic peptide"
HSFLAY

SEQ ID NO: 2946 - protein, 7 aa, synthetic construct
  REGION 1..7: note = source = /note="Description of Artificial Sequence: Synthetic peptide"
HGGESDV

SEQ ID NO: 2947 - protein, 11 aa, synthetic construct
  REGION 1..11: note = source = /note="Description of Artificial Sequence: Synthetic peptide"
GPYYYQSYMDV

SEQ ID NO: 2948 - protein, 14 aa, synthetic construct
  REGION 1..14: note = source = /note="Description of Artificial Sequence: Synthetic peptide"
LDSSGYYYARGPRY

SEQ ID NO: 2949 - protein, 9 aa, synthetic construct
  REGION 1..9: note = source = /note="Description of Artificial Sequence: Synthetic peptide"
GPYYYYMDV

SEQ ID NO: 2950 - protein, 7 aa, synthetic construct
  REGION 1..7: note = source = /note="Description of Artificial Sequence: Synthetic peptide"
HGGESDV

SEQ ID NO: 2951 - protein, 7 aa, synthetic construct
  REGION 1..7: note = source = /note="Description of Artificial Sequence: Synthetic peptide"
HGGESDV

SEQ ID NO: 2952 - protein, 7 aa, synthetic construct
  REGION 1..7: note = source = /note="Description of Artificial Sequence: Synthetic peptide"
HGGESDV

SEQ ID NO: 2953 - protein, 8 aa, synthetic construct
  REGION 1..8: note = source = /note="Description of Artificial Sequence: Synthetic peptide"
ESGDGMDV

SEQ ID NO: 2954 - protein, 7 aa, synthetic construct
  REGION 1..7: note = source = /note="Description of Artificial Sequence: Synthetic peptide"
HGGESDV

SEQ ID NO: 2955 - protein, 8 aa, synthetic construct
  REGION 1..8: note = source = /note="Description of Artificial Sequence: Synthetic peptide"
STMVREDY

SEQ ID NO: 2956 - protein, 7 aa, synthetic construct
  REGION 1..7: note = source = /note="Description of Artificial Sequence: Synthetic peptide"
HGGESDV

SEQ ID NO: 2957 - protein, 7 aa, synthetic construct
  REGION 1..7: note = source = /note="Description of Artificial Sequence: Synthetic peptide"
HGGESDV

SEQ ID NO: 2958 - protein, 7 aa, synthetic construct
  REGION 1..7: note = source = /note="Description of Artificial Sequence: Synthetic peptide"
HGGESDV

SEQ ID NO: 2959 - protein, 11 aa, synthetic construct
  REGION 1..11: note = source = /note="Description of Artificial Sequence: Synthetic peptide"
HWQEWPDAFDI

SEQ ID NO: 2960 - protein, 13 aa, synthetic construct
  REGION 1..13: note = source = /note="Description of Artificial Sequence: Synthetic peptide"
SGAGGTSATAFDI

SEQ ID NO: 2961 - protein, 10 aa, synthetic construct
  REGION 1..10: note = source = /note="Description of Artificial Sequence: Synthetic peptide"
TIAAVYAFDI

SEQ ID NO: 2962 - protein, 8 aa, synthetic construct
  REGION 1..8: note = source = /note="Description of Artificial Sequence: Synthetic peptide"
DLRGAFDI

SEQ ID NO: 2963 - protein, 11 aa, synthetic construct
  REGION 1..11: note = source = /note="Description of Artificial Sequence: Synthetic peptide"
EGSGSGWYFDF

SEQ ID NO: 2964 - protein, 13 aa, synthetic construct
  REGION 1..13: note = source = /note="Description of Artificial Sequence: Synthetic peptide"
AGIAARLRGAFDI

SEQ ID NO: 2965 - protein, 20 aa, synthetic construct
  REGION 1..20: note = source = /note="Description of Artificial Sequence: Synthetic peptide"
RGGYQLLRWDVGLLRSAFDI

SEQ ID NO: 2966 - protein, 13 aa, synthetic construct
  REGION 1..13: note = source = /note="Description of Artificial Sequence: Synthetic peptide"
SSPEGLFLYWFDP

SEQ ID NO: 2967 - protein, 9 aa, synthetic construct
  REGION 1..9: note = source = /note="Description of Artificial Sequence: Synthetic peptide"
VEGSGSLDY

SEQ ID NO: 2968 - protein, 9 aa, synthetic construct
  REGION 1..9: note = source = /note="Description of Artificial Sequence: Synthetic peptide"
RAGSEASDI

SEQ ID NO: 2969 - protein, 15 aa, synthetic construct
  REGION 1..15: note = source = /note="Description of Artificial Sequence: Synthetic peptide"
ATYKRELRYYYGMDV

SEQ ID NO: 2970 - protein, 15 aa, synthetic construct
  REGION 1..15: note = source = /note="Description of Artificial Sequence: Synthetic peptide"
ATYKRELRYYYGMDV

SEQ ID NO: 2971 - protein, 8 aa, synthetic construct
  REGION 1..8: note = source = /note="Description of Artificial Sequence: Synthetic peptide"
VGKAVPDV

SEQ ID NO: 2972 - protein, 13 aa, synthetic construct
  REGION 1..13: note = source = /note="Description of Artificial Sequence: Synthetic peptide"
HQGVAYYNYAMDV

SEQ ID NO: 2973 - protein, 8 aa, synthetic construct
  REGION 1..8: note = source = /note="Description of Artificial Sequence: Synthetic peptide"
VVRDGMDV

SEQ ID NO: 2974 - protein, 9 aa, synthetic construct
  REGION 1..9: note = source = /note="Description of Artificial Sequence: Synthetic peptide"
IPQTGTFDY

SEQ ID NO: 2975 - protein, 15 aa, synthetic construct
  REGION 1..15: note = source = /note="Description of Artificial Sequence: Synthetic peptide"
ANYKRELRYYYGMDV

SEQ ID NO: 2976 - protein, 11 aa, synthetic construct
  REGION 1..11: note = source = /note="Description of Artificial Sequence: Synthetic peptide"
ALVGATGAFDI

SEQ ID NO: 2977 - protein, 8 aa, synthetic construct
  REGION 1..8: note = source = /note="Description of Artificial Sequence: Synthetic peptide"
WFGEGFDP

SEQ ID NO: 2978 - protein, 17 aa, synthetic construct
  REGION 1..17: note = source = /note="Description of Artificial Sequence: Synthetic peptide"
VGYDSSGYYRDYYGMDV

SEQ ID NO: 2979 - protein, 13 aa, synthetic construct
  REGION 1..13: note = source = /note="Description of Artificial Sequence: Synthetic peptide"
MGWSSGYLGAFDI

SEQ ID NO: 2980 - protein, 13 aa, synthetic construct
  REGION 1..13: note = source = /note="Description of Artificial Sequence: Synthetic peptide"
GEIYYGYDGGFAY

SEQ ID NO: 2981 - protein, 8 aa, synthetic construct
  REGION 1..8: note = source = /note="Description of Artificial Sequence: Synthetic peptide"
DYSYAMDY

SEQ ID NO: 2982 - protein, 8 aa, synthetic construct
  REGION 1..8: note = source = /note="Description of Artificial Sequence: Synthetic peptide"
DYLYSLDF

SEQ ID NO: 2983 - protein, 8 aa, synthetic construct
  REGION 1..8: note = source = /note="Description of Artificial Sequence: Synthetic peptide"
DYLYSCDY

SEQ ID NO: 2984-2999 - skipped (16 entries)

SEQ ID NO: 3000 - protein, 11 aa, synthetic construct
  REGION 1..11: note = source = /note="Description of Artificial Sequence: Synthetic peptide"
RASQDIYNNLA

SEQ ID NO: 3001 - protein, 16 aa, synthetic construct
  REGION 1..16: note = source = /note="Description of Artificial Sequence: Synthetic peptide"
RSSQSLLHSNGYNYLD

SEQ ID NO: 3002 - protein, 11 aa, synthetic construct
  REGION 1..11: note = source = /note="Description of Artificial Sequence: Synthetic peptide"
GGNNIGTKSVH

SEQ ID NO: 3003 - protein, 11 aa, synthetic construct
  REGION 1..11: note = source = /note="Description of Artificial Sequence: Synthetic peptide"
SGDGLSKKYVS

SEQ ID NO: 3004 - protein, 11 aa, synthetic construct
  REGION 1..11: note = source = /note="Description of Artificial Sequence: Synthetic peptide"
RASQGIRNWLA

SEQ ID NO: 3005 - protein, 11 aa, synthetic construct
  REGION 1..11: note = source = /note="Description of Artificial Sequence: Synthetic peptide"
GGNNIGSKSVH

SEQ ID NO: 3006 - protein, 11 aa, synthetic construct
  REGION 1..11: note = source = /note="Description of Artificial Sequence: Synthetic peptide"
QGDSLGNYYAT

SEQ ID NO: 3007 - protein, 12 aa, synthetic construct
  REGION 1..12: note = source = /note="Description of Artificial Sequence: Synthetic peptide"
RASQSVSSAYLA

SEQ ID NO: 3008 - protein, 11 aa, synthetic construct
  REGION 1..11: note = source = /note="Description of Artificial Sequence: Synthetic peptide"
RASQSVSNSLA

SEQ ID NO: 3009 - protein, 12 aa, synthetic construct
  REGION 1..12: note = source = /note="Description of Artificial Sequence: Synthetic peptide"
RASQSVSSSFLA

SEQ ID NO: 3010 - protein, 12 aa, synthetic construct
  REGION 1..12: note = source = /note="Description of Artificial Sequence: Synthetic peptide"
RASQSVSTTFLA

SEQ ID NO: 3011 - protein, 11 aa, synthetic construct
  REGION 1..11: note = source = /note="Description of Artificial Sequence: Synthetic peptide"
RASQSISSYLN

SEQ ID NO: 3012 - protein, 12 aa, synthetic construct
  REGION 1..12: note = source = /note="Description of Artificial Sequence: Synthetic peptide"
RATQSIGSSFLA

SEQ ID NO: 3013 - protein, 12 aa, synthetic construct
  REGION 1..12: note = source = /note="Description of Artificial Sequence: Synthetic peptide"
RASQSVSSSYLA

SEQ ID NO: 3014 - protein, 12 aa, synthetic construct
  REGION 1..12: note = source = /note="Description of Artificial Sequence: Synthetic peptide"
RASQSVSSSYLA

SEQ ID NO: 3015 - protein, 12 aa, synthetic construct
  REGION 1..12: note = source = /note="Description of Artificial Sequence: Synthetic peptide"
RASQRVASNYLA

SEQ ID NO: 3016 - protein, 12 aa, synthetic construct
  REGION 1..12: note = source = /note="Description of Artificial Sequence: Synthetic peptide"
RASQSLSSNFLA

SEQ ID NO: 3017 - protein, 16 aa, synthetic construct
  REGION 1..16: note = source = /note="Description of Artificial Sequence: Synthetic peptide"
RSSQSLLHSNGYNYLD

SEQ ID NO: 3018 - protein, 12 aa, synthetic construct
  REGION 1..12: note = source = /note="Description of Artificial Sequence: Synthetic peptide"
RASQSVSSSYLA

SEQ ID NO: 3019 - protein, 12 aa, synthetic construct
  REGION 1..12: note = source = /note="Description of Artificial Sequence: Synthetic peptide"
RASQSVASSFLA

SEQ ID NO: 3020 - protein, 11 aa, synthetic construct
  REGION 1..11: note = source = /note="Description of Artificial Sequence: Synthetic peptide"
RASQDVNTAVS

SEQ ID NO: 3021 - protein, 15 aa, synthetic construct
  REGION 1..15: note = source = /note="Description of Artificial Sequence: Synthetic peptide"
RASESVSVIGAHLIH

SEQ ID NO: 3022 - protein, 15 aa, synthetic construct
  REGION 1..15: note = source = /note="Description of Artificial Sequence: Synthetic peptide"
RASESVTILGSHLIY

SEQ ID NO: 3023 - protein, 15 aa, synthetic construct
  REGION 1..15: note = source = /note="Description of Artificial Sequence: Synthetic peptide"
RASESVTILGSHLIY

SEQ ID NO: 3024 - protein, 7 aa, synthetic construct
  REGION 1..7: note = source = /note="Description of Artificial Sequence: Synthetic peptide"
GASRRAT

SEQ ID NO: 3025 - protein, 7 aa, synthetic construct
  REGION 1..7: note = source = /note="Description of Artificial Sequence: Synthetic peptide"
LGSNRAS

SEQ ID NO: 3026 - protein, 7 aa, synthetic construct
  REGION 1..7: note = source = /note="Description of Artificial Sequence: Synthetic peptide"
EVSNRFS

SEQ ID NO: 3027 - protein, 7 aa, synthetic construct
  REGION 1..7: note = source = /note="Description of Artificial Sequence: Synthetic peptide"
LGSKRAS

SEQ ID NO: 3028 - protein, 7 aa, synthetic construct
  REGION 1..7: note = source = /note="Description of Artificial Sequence: Synthetic peptide"
GASTLAS

SEQ ID NO: 3029 - protein, 7 aa, synthetic construct
  REGION 1..7: note = source = /note="Description of Artificial Sequence: Synthetic peptide"
LGSNRAS

SEQ ID NO: 3030 - protein, 7 aa, synthetic construct
  REGION 1..7: note = source = /note="Description of Artificial Sequence: Synthetic peptide"
GASTRAS

SEQ ID NO: 3031 - protein, 7 aa, synthetic construct
  REGION 1..7: note = source = /note="Description of Artificial Sequence: Synthetic peptide"
GASIRAT

SEQ ID NO: 3032 - protein, 7 aa, synthetic construct
  REGION 1..7: note = source = /note="Description of Artificial Sequence: Synthetic peptide"
DASNRAT

SEQ ID NO: 3033 - protein, 7 aa, synthetic construct
  REGION 1..7: note = source = /note="Description of Artificial Sequence: Synthetic peptide"
AASSLQS

SEQ ID NO: 3034 - skipped

SEQ ID NO: 3035 - protein, 7 aa, synthetic construct
  REGION 1..7: note = source = /note="Description of Artificial Sequence: Synthetic peptide"
EVSNRDS

SEQ ID NO: 3036 - protein, 7 aa, synthetic construct
  REGION 1..7: note = source = /note="Description of Artificial Sequence: Synthetic peptide"
DASTLQT

SEQ ID NO: 3037 - protein, 7 aa, synthetic construct
  REGION 1..7: note = source = /note="Description of Artificial Sequence: Synthetic peptide"
GASTRAT

SEQ ID NO: 3038 - protein, 7 aa, synthetic construct
  REGION 1..7: note = source = /note="Description of Artificial Sequence: Synthetic peptide"
GASSRAS

SEQ ID NO: 3039 - protein, 7 aa, synthetic construct
  REGION 1..7: note = source = /note="Description of Artificial Sequence: Synthetic peptide"
SATSPVP

SEQ ID NO: 3040 - protein, 7 aa, synthetic construct
  REGION 1..7: note = source = /note="Description of Artificial Sequence: Synthetic peptide"
AANKSQS

SEQ ID NO: 3041 - protein, 7 aa, synthetic construct
  REGION 1..7: note = source = /note="Description of Artificial Sequence: Synthetic peptide"
LGSNRAS

SEQ ID NO: 3042 - protein, 7 aa, synthetic construct
  REGION 1..7: note = source = /note="Description of Artificial Sequence: Synthetic peptide"
DDSVRPS

SEQ ID NO: 3043 - protein, 7 aa, synthetic construct
  REGION 1..7: note = source = /note="Description of Artificial Sequence: Synthetic peptide"
RDKERPS

SEQ ID NO: 3044 - protein, 7 aa, synthetic construct
  REGION 1..7: note = source = /note="Description of Artificial Sequence: Synthetic peptide"
AASNLQS

SEQ ID NO: 3045 - protein, 7 aa, synthetic construct
  REGION 1..7: note = source = /note="Description of Artificial Sequence: Synthetic peptide"
GKNNRPS

SEQ ID NO: 3046 - protein, 7 aa, synthetic construct
  REGION 1..7: note = source = /note="Description of Artificial Sequence: Synthetic peptide"
GTNNRPS

SEQ ID NO: 3047 - protein, 7 aa, synthetic construct
  REGION 1..7: note = source = /note="Description of Artificial Sequence: Synthetic peptide"
GASTRAT

SEQ ID NO: 3048 - protein, 7 aa, synthetic construct
  REGION 1..7: note = source = /note="Description of Artificial Sequence: Synthetic peptide"
DASSRAT

SEQ ID NO: 3049 - protein, 7 aa, synthetic construct
  REGION 1..7: note = source = /note="Description of Artificial Sequence: Synthetic peptide"
GASSRAT

SEQ ID NO: 3050 - protein, 7 aa, synthetic construct
  REGION 1..7: note = source = /note="Description of Artificial Sequence: Synthetic peptide"
GSSNRAT

SEQ ID NO: 3051 - protein, 7 aa, synthetic construct
  REGION 1..7: note = source = /note="Description of Artificial Sequence: Synthetic peptide"
AASSLQS

SEQ ID NO: 3052 - protein, 7 aa, synthetic construct
  REGION 1..7: note = source = /note="Description of Artificial Sequence: Synthetic peptide"
GASQRAT

SEQ ID NO: 3053 - protein, 7 aa, synthetic construct
  REGION 1..7: note = source = /note="Description of Artificial Sequence: Synthetic peptide"
GASSRAT

SEQ ID NO: 3054 - protein, 7 aa, synthetic construct
  REGION 1..7: note = source = /note="Description of Artificial Sequence: Synthetic peptide"
GASSRAT

SEQ ID NO: 3055 - protein, 7 aa, synthetic construct
  REGION 1..7: note = source = /note="Description of Artificial Sequence: Synthetic peptide"
GASSRAT

SEQ ID NO: 3056 - protein, 7 aa, synthetic construct
  REGION 1..7: note = source = /note="Description of Artificial Sequence: Synthetic peptide"
GASNWAT

SEQ ID NO: 3057 - protein, 7 aa, synthetic construct
  REGION 1..7: note = source = /note="Description of Artificial Sequence: Synthetic peptide"
LGSNRAS

SEQ ID NO: 3058 - protein, 7 aa, synthetic construct
  REGION 1..7: note = source = /note="Description of Artificial Sequence: Synthetic peptide"
GTSSRAT

SEQ ID NO: 3059 - protein, 7 aa, synthetic construct
  REGION 1..7: note = source = /note="Description of Artificial Sequence: Synthetic peptide"
GASGRAT

SEQ ID NO: 3060 - protein, 7 aa, synthetic construct
  REGION 1..7: note = source = /note="Description of Artificial Sequence: Synthetic peptide"
SASYRYT

SEQ ID NO: 3061 - protein, 7 aa, synthetic construct
  REGION 1..7: note = source = /note="Description of Artificial Sequence: Synthetic peptide"
LASNLET

SEQ ID NO: 3062 - protein, 7 aa, synthetic construct
  REGION 1..7: note = source = /note="Description of Artificial Sequence: Synthetic peptide"
LASNVQT

SEQ ID NO: 3063 - protein, 7 aa, synthetic construct
  REGION 1..7: note = source = /note="Description of Artificial Sequence: Synthetic peptide"
LASNVQT

SEQ ID NO: 3064 - protein, 10 aa, synthetic construct
  REGION 1..10: note = source = /note="Description of Artificial Sequence: Synthetic peptide"
QQYHSSPSWT

SEQ ID NO: 3065 - protein, 9 aa, synthetic construct
  REGION 1..9: note = source = /note="Description of Artificial Sequence: Synthetic peptide"
MQALQTPYT

SEQ ID NO: 3066 - protein, 8 aa, synthetic construct
  REGION 1..8: note = source = /note="Description of Artificial Sequence: Synthetic peptide"
MQNIQFPS

SEQ ID NO: 3067 - protein, 9 aa, synthetic construct
  REGION 1..9: note = source = /note="Description of Artificial Sequence: Synthetic peptide"
MQALQTPYT

SEQ ID NO: 3068 - protein, 8 aa, synthetic construct
  REGION 1..8: note = source = /note="Description of Artificial Sequence: Synthetic peptide"
QQSYKRAS

SEQ ID NO: 3069 - protein, 9 aa, synthetic construct
  REGION 1..9: note = source = /note="Description of Artificial Sequence: Synthetic peptide"
MQGRQFPYS

SEQ ID NO: 3070 - protein, 8 aa, synthetic construct
  REGION 1..8: note = source = /note="Description of Artificial Sequence: Synthetic peptide"
QQYGSSLT

SEQ ID NO: 3071 - protein, 9 aa, synthetic construct
  REGION 1..9: note = source = /note="Description of Artificial Sequence: Synthetic peptide"
QQYGSSSWT

SEQ ID NO: 3072 - protein, 10 aa, synthetic construct
  REGION 1..10: note = source = /note="Description of Artificial Sequence: Synthetic peptide"
QQYGSSPPWT

SEQ ID NO: 3073 - protein, 7 aa, synthetic construct
  REGION 1..7: note = source = /note="Description of Artificial Sequence: Synthetic peptide"
QQSYTLA

SEQ ID NO: 3074 - protein, 9 aa, synthetic construct
  REGION 1..9: note = source = /note="Description of Artificial Sequence: Synthetic peptide"
QQSYSTPYT

SEQ ID NO: 3075 - protein, 9 aa, synthetic construct
  REGION 1..9: note = source = /note="Description of Artificial Sequence: Synthetic peptide"
MQGTHWPGT

SEQ ID NO: 3076 - protein, 9 aa, synthetic construct
  REGION 1..9: note = source = /note="Description of Artificial Sequence: Synthetic peptide"
QQYESLPLT

SEQ ID NO: 3077 - protein, 10 aa, synthetic construct
  REGION 1..10: note = source = /note="Description of Artificial Sequence: Synthetic peptide"
QQYNDWLPVT

SEQ ID NO: 3078 - protein, 10 aa, synthetic construct
  REGION 1..10: note = source = /note="Description of Artificial Sequence: Synthetic peptide"
QQYAGSPPFT

SEQ ID NO: 3079 - protein, 9 aa, synthetic construct
  REGION 1..9: note = source = /note="Description of Artificial Sequence: Synthetic peptide"
LQHDNFPLT

SEQ ID NO: 3080 - protein, 9 aa, synthetic construct
  REGION 1..9: note = source = /note="Description of Artificial Sequence: Synthetic peptide"
QHYYRFPYS

SEQ ID NO: 3081 - protein, 9 aa, synthetic construct
  REGION 1..9: note = source = /note="Description of Artificial Sequence: Synthetic peptide"
MQALQTPYT

SEQ ID NO: 3082 - protein, 11 aa, synthetic construct
  REGION 1..11: note = source = /note="Description of Artificial Sequence: Synthetic peptide"
QVWDSDSEHVV

SEQ ID NO: 3083 - protein, 9 aa, synthetic construct
  REGION 1..9: note = source = /note="Description of Artificial Sequence: Synthetic peptide"
QAWDDTTVV

SEQ ID NO: 3084 - protein, 9 aa, synthetic construct
  REGION 1..9: note = source = /note="Description of Artificial Sequence: Synthetic peptide"
QKYNSAPFT

SEQ ID NO: 3085 - protein, 12 aa, synthetic construct
  REGION 1..12: note = source = /note="Description of Artificial Sequence: Synthetic peptide"
SSRDSSGDHLRV

SEQ ID NO: 3086 - protein, 11 aa, synthetic construct
  REGION 1..11: note = source = /note="Description of Artificial Sequence: Synthetic peptide"
NSRDSSGHHLL

SEQ ID NO: 3087 - protein, 14 aa, synthetic construct
  REGION 1..14: note = source = /note="Description of Artificial Sequence: Synthetic peptide"
QHYGSSFNGSSLFT

SEQ ID NO: 3088 - protein, 10 aa, synthetic construct
  REGION 1..10: note = source = /note="Description of Artificial Sequence: Synthetic peptide"
QQFGTSSGLT

SEQ ID NO: 3089 - protein, 10 aa, synthetic construct
  REGION 1..10: note = source = /note="Description of Artificial Sequence: Synthetic peptide"
QQYHSSPSWT

SEQ ID NO: 3090 - protein, 10 aa, synthetic construct
  REGION 1..10: note = source = /note="Description of Artificial Sequence: Synthetic peptide"
QQYHSSPSWT

SEQ ID NO: 3091 - protein, 9 aa, synthetic construct
  REGION 1..9: note = source = /note="Description of Artificial Sequence: Synthetic peptide"
QQSYSTPYS

SEQ ID NO: 3092 - protein, 10 aa, synthetic construct
  REGION 1..10: note = source = /note="Description of Artificial Sequence: Synthetic peptide"
QHYESSPSWT

SEQ ID NO: 3093 - protein, 10 aa, synthetic construct
  REGION 1..10: note = source = /note="Description of Artificial Sequence: Synthetic peptide"
QQYGSPPRFT

SEQ ID NO: 3094 - protein, 10 aa, synthetic construct
  REGION 1..10: note = source = /note="Description of Artificial Sequence: Synthetic peptide"
QHYGSSPSWT

SEQ ID NO: 3095 - protein, 10 aa, synthetic construct
  REGION 1..10: note = source = /note="Description of Artificial Sequence: Synthetic peptide"
QHYDSSPSWT

SEQ ID NO: 3096 - protein, 10 aa, synthetic construct
  REGION 1..10: note = source = /note="Description of Artificial Sequence: Synthetic peptide"
QYYGTSPMYT

SEQ ID NO: 3097 - protein, 9 aa, synthetic construct
  REGION 1..9: note = source = /note="Description of Artificial Sequence: Synthetic peptide"
MQALQTPLT

SEQ ID NO: 3098 - protein, 11 aa, synthetic construct
  REGION 1..11: note = source = /note="Description of Artificial Sequence: Synthetic peptide"
QHYGNSPPKFT

SEQ ID NO: 3099 - protein, 10 aa, synthetic construct
  REGION 1..10: note = source = /note="Description of Artificial Sequence: Synthetic peptide"
QHYGGSPRLT

SEQ ID NO: 3100 - protein, 9 aa, synthetic construct
  REGION 1..9: note = source = /note="Description of Artificial Sequence: Synthetic peptide"
QQHYSTPWT

SEQ ID NO: 3101 - protein, 9 aa, synthetic construct
  REGION 1..9: note = source = /note="Description of Artificial Sequence: Synthetic peptide"
LQSRIFPRT

SEQ ID NO: 3102 - protein, 9 aa, synthetic construct
  REGION 1..9: note = source = /note="Description of Artificial Sequence: Synthetic peptide"
LQSRTIPRT

SEQ ID NO: 3103 - protein, 9 aa, synthetic construct
  REGION 1..9: note = source = /note="Description of Artificial Sequence: Synthetic peptide"
LQSRTIPRT

SEQ ID NO: 3104-3199 - skipped (96 entries)

SEQ ID NO: 3200 - protein, 20 aa, synthetic construct
  REGION 1..20: note = source = /note="Description of Artificial Sequence: Synthetic peptide"
GGGGSGGGGSGGGGSGGGGS

SEQ ID NO: 3201-3983 - skipped (783 entries)

SEQ ID NO: 3984 - protein, 12 aa, synthetic construct
  REGION 1..12: note = source = /note="Description of Artificial Sequence: Synthetic peptide"
RASQSISSSFLA

SEQ ID NO: 3985 - protein, 16 aa, synthetic construct
  REGION 1..16: note = source = /note="Description of Artificial Sequence: Synthetic peptide"
RSSQSLLHSNGYNYLD

SEQ ID NO: 3986 - protein, 16 aa, synthetic construct
  REGION 1..16: note = source = /note="Description of Artificial Sequence: Synthetic peptide"
KSSQSLLRNDGKTPLY

SEQ ID NO: 3987 - protein, 16 aa, synthetic construct
  REGION 1..16: note = source = /note="Description of Artificial Sequence: Synthetic peptide"
RSSQSLLHSNGYNYLN

SEQ ID NO: 3988 - protein, 11 aa, synthetic construct
  REGION 1..11: note = source = /note="Description of Artificial Sequence: Synthetic peptide"
RASQSISSYLN

SEQ ID NO: 3989 - protein, 16 aa, synthetic construct
  REGION 1..16: note = source = /note="Description of Artificial Sequence: Synthetic peptide"
RSSQSLLYSNGYNYVD

SEQ ID NO: 3990 - protein, 11 aa, synthetic construct
  REGION 1..11: note = source = /note="Description of Artificial Sequence: Synthetic peptide"
RASQSVSSNLA

SEQ ID NO: 3991 - protein, 11 aa, synthetic construct
  REGION 1..11: note = source = /note="Description of Artificial Sequence: Synthetic peptide"
RASQSVSSKLA

SEQ ID NO: 3992 - protein, 12 aa, synthetic construct
  REGION 1..12: note = source = /note="Description of Artificial Sequence: Synthetic peptide"
RASQSVGSTNLA

SEQ ID NO: 3993 - protein, 11 aa, synthetic construct
  REGION 1..11: note = source = /note="Description of Artificial Sequence: Synthetic peptide"
RASQSISSYLN

SEQ ID NO: 3994 - protein, 11 aa, synthetic construct
  REGION 1..11: note = source = /note="Description of Artificial Sequence: Synthetic peptide"
RASQSISSYLN

SEQ ID NO: 3995 - protein, 16 aa, synthetic construct
  REGION 1..16: note = source = /note="Description of Artificial Sequence: Synthetic peptide"
KSSESLVHNSGKTYLN

SEQ ID NO: 3996 - protein, 11 aa, synthetic construct
  REGION 1..11: note = source = /note="Description of Artificial Sequence: Synthetic peptide"
QASEDINKFLN

SEQ ID NO: 3997 - protein, 11 aa, synthetic construct
  REGION 1..11: note = source = /note="Description of Artificial Sequence: Synthetic peptide"
RASQSVGSNLA

SEQ ID NO: 3998 - protein, 12 aa, synthetic construct
  REGION 1..12: note = source = /note="Description of Artificial Sequence: Synthetic peptide"
RASQSIGSSSLA

SEQ ID NO: 3999 - protein, 11 aa, synthetic construct
  REGION 1..11: note = source = /note="Description of Artificial Sequence: Synthetic peptide"
KASQDIDDAMN

SEQ ID NO: 4000 - protein, 119 aa, synthetic construct
  REGION 1..119: note = source = /note="Description of Artificial Sequence: Synthetic polypeptide"
QVQLLESGAELVRPGSSVKISCKASGYAFSSYWMNWVKQRPGQGLEWIGQIYPGDGDTNYNGKFKGQATLTADKSSSTAYMQLSGLTSEDSAVYSCARKTISSVVDFYFDYWGQGTTVT

SEQ ID NO: 4001 - protein, 111 aa, synthetic construct
  REGION 1..111: note = source = /note="Description of Artificial Sequence: Synthetic polypeptide"
ELVLTQSPKFMSTSVGDRVSVTCKASQNVGTNVAWYQQKPGQSPKPLIYSATYRNSGVPDRFTGSGSGTDFTLTITNVQSKDLADYFYFCQYNRYPYTSGGGTKLEIKRRS

SEQ ID NO: 4002 - protein, 10 aa, synthetic construct
  REGION 1..10: note = source = /note="Description of Artificial Sequence: Synthetic peptide"
YCARGNWDDY

1. (canceled)

2. A method of treating a subject having a hematological cancer, comprising administering to the subject a plurality of cells that express a chimeric antigen receptor (CAR) molecule, wherein the CAR molecule is:
(i) a murine CAR molecule that binds to CD19, and wherein the hematological cancer is acute lymphoid leukemia (ALL);
(ii) a humanized CAR molecule that binds to CD19; or
(iii) a CAR molecule that binds to BCMA,
wherein the plurality of CAR-expressing cells is administered at a dose of about 0.2×10⁶ to 5.0×10⁶ viable CAR-expressing cells/kg, when the subject weighs ≤50 kg; or at a dose of about 0.1×10⁸ to 2.5×10⁸ viable CAR-expressing cells, when the subject weighs >50 kg.

3. The method of claim 2, wherein the plurality of cells is administered at:
(i) a dose of about 0.2×10⁶ to 2.0×10⁶, about 0.2×10⁶ to 1.8×10⁶, about 0.2×10⁶ to 1.6×10⁶, about 0.2×10⁶ to 1.4×10⁶, about 0.2×10⁶ to 1.2×10⁶, about 0.2×10⁶ to 1.0×10⁶, about 0.2×10⁶ to 0.8×10⁶, about 0.2×10⁶ to 0.6×10⁶, or about 0.2×10⁶ to 0.4×10⁶ viable CAR-expressing cells/kg, when the subject weighs ≤50 kg;
(ii) a dose of about 0.2×10⁶, about 0.4×10⁶, about 0.6×10⁶, about 0.8×10⁶, about 1.0×10⁶, about 1.5×10⁶, about 2.0×10⁶, about 2.5×10⁶, about 3.0×10⁶, about 3.5×10⁶, about 4.0×10⁶, about 4.5×10⁶, or about 5.0×10⁶ viable CAR-expressing cells/kg, when the subject weighs ≤50 kg;
(iii) a dose of about 0.1×10⁸ to 1.0×10⁸, about 0.1×10⁸ to 0.9×10⁸, about 0.1×10⁸ to 0.8×10⁸, about 0.1×10⁸ to 0.6×10⁸, about 0.1×10⁸ to 0.4×10⁸, about 0.1×10⁸ to 0.2×10⁸, about 0.2×10⁸ to 1.0×10⁸, about 0.2×10⁸ to 0.9×10⁸, about 0.2×10⁸ to 0.8×10⁸, about 0.2×10⁸ to 0.6×10⁸, or about 0.2×10⁸ to 0.4×10⁸ viable CAR-expressing cells, when the subject weighs ≥50 kg; or
(iv) a dose of about 0.1×10⁸, about 0.2×10⁸, about 0.4×10⁸, about 0.6×10⁸, about 0.8×10⁸, about 1.0×10⁸, about 1.5×10⁸, about 2.0×10⁸, or about 2.5×10⁸ viable CAR-expressing cells, when the subject weighs >50 kg.

4. The method of claim 2, wherein the subject is a pediatric or young adult aged about, or an adult.

5. (canceled)

6. The method of claim 2, wherein the hematological cancer is acute lymphoid leukemia (ALL).

7. (canceled)

8. A method of treating a subject having a hematological cancer, comprising administering to the subject at least two doses of a plurality of cells that express a chimeric antigen receptor (CAR) molecule, wherein the CAR molecule is:
(i) a murine CAR molecule that binds to CD19, and wherein the hematological cancer is acute lymphoid leukemia (ALL);
(ii) a humanized CAR molecule that binds to CD19; or
(iii) a CAR molecule that binds to BCMA,
wherein the at least two doses together add up to a total dose of at least about 0.2×10⁶ viable CAR-expressing cells/kg, when the subject weighs ≤50 kg; or a total dose of at least about 0.1×10⁸ viable CAR-expressing cells, when the subject weighs >50 kg.

9. The method of claim 8, wherein the at least two doses are administered separately with a time interval of about one day.

10. The method of claim 8, wherein the at least two doses comprise a first dose, a second dose, and a third dose, wherein the first dose is administered on a first day of treatment, the second dose is administered on a subsequent day of treatment, and the third dose is administered on a yet subsequent day of treatment.

11. The method of claim 10, wherein:
(i) the first dose is administered on the first day of treatment, the second dose is administered on the second day of treatment, and the third dose is administered on the third day of treatment;
(ii) the first dose is about 10% of the total dose, the second dose is about 30% of the total dose, and the third dose is about 60% of the total dose; or
(iii) the total dose is about 5×10⁷ to 5×10⁸ viable CAR-expressing cells.

12-13. (canceled)

14. The method of claim 8, wherein the subject is a pediatric or young adult; or an adult.

15. (canceled)

16. The method of claim 8, wherein the hematological cancer is acute lymphoid leukemia (ALL).

17. A method of evaluating the effectiveness of a CAR-expressing cell therapy in a subject having a hematological cancer, who has received or is receiving the CAR-expressing cell therapy, comprising measuring soluble BCMA (sBCMA) level or activity in the subject at at least two time points after the beginning of the CAR-expressing cell therapy, wherein:
(i) a decrease in the sBCMA level or activity over time indicates that the CAR-expressing cell therapy is effective in the subject; or
(ii) the absence of a decrease in the sBCMA level or activity over time indicates that the CAR-expressing cell therapy has reduced efficacy,
thereby evaluating the subject.

18-20. (canceled)

21. A method of treating a subject having hematological cancer, who has received or is receiving a first CAR-expressing cell therapy, comprising measuring soluble BCMA (sBCMA) level or activity in the subject at at least two time points after the beginning of the first CAR-expressing cell therapy, wherein if the sBCMA level or activity does not decrease over time, administer a second therapy to the subject, thereby treating the subject.

22-23. (canceled)

24. A method of monitoring cancer relapse in a subject having hematological cancer, who has responded or partially responded to a CAR-expressing cell therapy, comprising measuring soluble BCMA (sBCMA) level or activity in the subject at at least two time points after the subject responded or partially responded to the CAR-expressing cell therapy, wherein:
(i) an increase in the sBCMA level or activity over time indicates that the cancer is relapsing; or
(ii) the absence of an increase, in the sBCMA level or activity over time indicates that the cancer is not relapsing.

25-28. (canceled)

29. The method of claim 21, wherein the second therapy comprises a B cell inhibitor.

30-34. (canceled)

35. The method of claim 2, wherein the murine CAR molecule that binds to CD19 comprises:
(i) one or more of a heavy chain complementarity determining region 1 (HCDR1), HCDR2, and HCDR3 of any CD19 scFv domain amino acid sequence listed in Table 3 and one or more of a light chain complementarity determining region 1 (LCDR1), LCDR2, and LCDR3 of any CD19 scFv domain amino acid sequence listed in Table 3;
(ii) a heavy chain variable region (VH) of any CD19 scFv domain amino acid sequence listed in Table 3 and a light chain variable region (VL) of any CD19 scFv domain amino acid sequence listed in Table 3;
(iii) a CD19 scFv domain amino acid sequence listed in Table 3; or
(iv) a full-length CD19 CAR amino acid sequence listed in Table 3.

36. The method of claim 2, wherein the humanized CAR molecule that binds to CD19 comprises:
(i) one or more of a heavy chain complementarity determining region 1 (HCDR1), HCDR2, and HCDR3 of any CD19 scFv domain amino acid sequence listed in Table 2 and one or more of a light chain complementarity determining region 1 (LCDR1), LCDR2, and LCDR3 of any CD19 scFv domain amino acid sequence listed in Table 2;
(ii) a heavy chain variable region (VH) of any CD19 scFv domain amino acid sequence listed in Table 2 and a light chain variable region (VL) of any CD19 scFv domain amino acid sequence listed in Table 2;
(iii) a CD19 scFv domain amino acid sequence listed in Table 2; or
(iv) a full-length CD19 CAR amino acid sequence listed in Table 2.

37. The method of claim 2, wherein the CAR molecule that binds to BCMA comprises:
(i) one or more of a heavy chain complementarity determining region 1 (HCDR1), HCDR2, and HCDR3 of any CD19 scFv domain amino acid sequence listed in Table 4D or 4E and one or more of light chain complementarity determining region 1 (LCDR1), LCDR2, and LCDR3 of any CD19 scFv domain amino acid sequence listed in Table 4D or 4E;
(ii) a heavy chain variable region (VH) listed in Table 4D or 4E and a light chain variable region (VL) listed in Table 4D or 4E;
(iii) a BCMA scFv domain amino acid sequence listed in Table 4D or 4E; or
(iv) a full-length BCMA CAR amino acid sequence listed in Table 4D or 4E.

38. The method of claim 2, wherein the CAR molecule comprises:
(i) a scFv;
(ii) a transmembrane domain of protein selected from the group consisting of the alpha, beta or zeta chain of the T-cell receptor, CD28, CD3 epsilon, CD45, CD4, CD5, CD8, CD9, CD16, CD22, CD33, CD37, CD64, CD80, CD86, CD134, CD137 and CD154;
(iii) a hinge region comprising SEQ ID NO:14, or a sequence with 95-99% identity thereof;
(iv) a costimulatory domain from a protein selected from the group consisting of OX40, CD2, CD27, CD28, CDS, ICAM-1, LFA-1 (CD11a/CD18), ICOS (CD278), and 4-1BB (CD137), wherein optionally the costimulatory domain comprises the amino acid sequence of SEQ ID NO:16 or 51;
(v) an intracellular signaling domain comprising a functional signaling domain of 4-1BB and/or a functional signaling domain of CD3 zeta; or
(vi) a leader sequence.

39. The method of claim 2, wherein the plurality of cells comprises T cells or NK cells.

40. The method of claim 21, wherein the hematological cancer is chosen from acute leukemia, B-cell acute lymphoid leukemia (BALL), T-cell acute lymphoid leukemia (TALL), small lymphocytic lymphoma (SLL), acute lymphoid leukemia (ALL), chronic leukemia, chronic myelogenous leukemia (CML), chronic lymphocytic leukemia (CLL), non-Hodgkin lymphoma, or multiple myeloma.

41-43. (canceled)
